(19) United States
(12) Patent Application Publication
(10) Pub. No.: US 2025/0230505 A1
(43) Pub. Date: Jul. 17, 2025

(54) METHODS OF TREATING REFRACTORY INFLAMMATORY DISEASE USING TRANSCRIPTOMIC AND GENETIC RISK SIGNATURES

(71) Applicant: CEDARS-SINAI MEDICAL CENTER, Los Angeles, CA (US)

(72) Inventors: Alka POTDAR, Cumming, GA (US); Dermot P. MCGOVERN, Los Angeles, CA (US); Janine BILSBOROUGH, Adelaide (AU); Stephan TARGAN, Santa Monica, CA (US)

(21) Appl. No.: 19/020,744

(22) Filed: Jan. 14, 2025

Related U.S. Application Data
(62) Division of application No. 17/258,133, filed on Jan. 5, 2021, now Pat. No. 12,264,368.
(60) Provisional application No. 62/694,935, filed on Jul. 6, 2018.
(60) Provisional application No. 62/786,207, filed on Dec. 28, 2018.

(51) Int. Cl. C12Q 1/6883

(52) U.S. Cl. CPC C12Q 1/6883; C12Q 2600/106; C12Q 2600/112; C12Q 2600/156; C12Q 2600/158

(57) ABSTRACT

Disclosed herein are methods, kits and compositions for treating an inflammatory disease. These methods, kits and compositions may be particularly useful for subjects carrying a risk genotype and/or expressing a transcriptomic risk signature that is indicative of severe inflammatory disease phenotypes for which existing treatment options are limited.

### CROSS-REFERENCE

[0001] This application is a divisional application of U.S. application Ser. No. 17/258,133, filed Jan. 5, 2021, now issued as U.S. Pat. No. 12,264,368 on Apr. 1, 2025, which is a national phase entry of International Application No. PCT/US2019/040394, filed Jul. 2, 2019, which claims the benefit of U.S. Provisional Application Ser. No. 62/694,935, filed Jul. 6, 2018, and U.S. Provisional Application Ser. No. 62/786,207, filed Dec. 28, 2018, each of which are incorporated herein by reference in their entirety.

### SEQUENCE LISTING

[0002] The instant application contains a Sequence Listing which has been submitted electronically in XML format and is hereby incorporated by reference in its entirety. Said copy, created on Apr. 1, 2025, is named 56884-742.401_SL.xml and is 2,959,071 bytes in size.

### BACKGROUND

[0003] Inflammatory bowel disease (IBD) comprises a variety of disorders associated with chronic inflammation of gastrointestinal tract. Classically, IBD has been assigned as either ulcerative colitis (UC) or Crohn's disease (CD). CD most commonly affects the small bowel (SB) and exhibits a diversity of clinical and subclinical phenotypes including stricturing, internal penetrating and perianal CD (pCD). By contrast, UC predominantly affects the large intestine or colon, and likewise exhibits many clinical and subclinical phenotypes, including medically refractory UC (mrUC). IBD is further characterized based on disease location, which in some cases, can serve as a predictor of disease severity. For example, CD predominantly affecting the ileum is associated with worse patient outcomes, as compared to colonic disease. This heterogeneity provides a challenge for the development of effective therapies and may be one of the reasons behind drug development failures and limited efficacy with existing therapies.

[0004] Existing IBD therapies, such as steroids and tumor necrosis factor (TNF) inhibitors are typically used as a first line treatment for treating IBD. Unfortunately, a significant number of patients experience a lack of response, or a loss-of-response over time, to the IBD therapy. While a patient is treated with an IBD therapy that is ineffective, the disease worsens. Surgey, in the form of strictureplasty (reshaping of the intestine) or resection (removal of the intestine), is the only treatment option for patients that do not respond to first line therapies. Surgical treatments for IBD are invasive, causing post-operative risks for an estimated third of patients undergoing surgery, such as anastomotic leak, infection, and bleeding.

[0005] The heterogeneity of disease pathogenesis and clinical course, combined with the variable response to treatment and its associated side effects, suggests a personalized medicine approach to treating these diseases is best treatment strategy. A unique genetic or transcriptomic signature is needed to identify homogenous CD patient subgroups with shared disease pathology, to aid in the development and the selection of effective therapeutic strategies for these patients.

### SUMMARY

[0006] Provided herein are methods of classifying Crohn's disease (CD) subtypes using transcriptomic and genetic signatures associated with clinically distinct forms of CD. Colon-like (e.g., disease affecting the colon) or ileum-like (e.g, disease affecting the ileum) gene expression profiles are used herein to classify adult and pediatric CD patients by clinically distinct subgroups. Disease course was classified using transcriptional profiling of T cells from patients. Transcriptional risk scores (TRS) calculated in a CD cohort were used to connect genetic variants, such as single nucleotide polymorphisms (SNPs), to expression quantitative trait loci (eQTL), that can be used to identify CD patients that have an increased likelihood of progressing to complicated forms of CD over time.

[0007] A cohort of refractory CD patients with varying disease course who underwent small bowel (SB) resection as part of treatment were analyzed to stratify the CD patients based on the pathogenic homogeneity. Clinically relevant subgroups were identified using both messenger RNA (mRNA) expression and genetic data from uninvolved ileal tissue taken from SB resections. Within this heterogeneous, refractory CD population, clinically distinct patient subgroups with varying disease severity were identified The genetic- and transcriptomics-based signals from the same patients were overlapped to define molecular signatures, disclosed herein, that aid in the development of therapeutic strategies for these patient subgroups.

[0008] Refractory CD can be stratified into three patient subgroups disclosed herein, including CD 1 subgroup (CD1), CD 2 subgroup (CD2) and CD 3 subgroup (CD3). CD3 is characterized by a more severe, refractory, disease course, as compared to CD1 and CD2. Compared to CD1, CD3 is enriched for subjects with increased disease recurrence after a first surgery (OR=6.78, P=0.04), and are more likely to undergo a second surgery (OR=5.07, P=0.016). CD3 is also enriched for a presence of perianal CD (OR=3.61, P=0.036), which includes inflammation at or near the anus, and in many cases includes fissures, abscesses or stenosis. In addition, there are fewer patients in CD3 that show recurrence-free survival, as compared to CD1 (p=0.02, median survival time (months), CD1=10 and CD3=6). CD3 palients represent a severe, refractory CD patient subgroup that would benefit from an earlier and more aggressive therapeutic intervention, as compared to CD1.

[0009] Provided herein are 174 genes that were identified representing both genetic and biological differences between the CD subgroups, by overlaying differential gene expression between CD1 and CD3 with CD subgroup-associated genetic polymorphisms or genotypes.

[0010] In addition, CD3 was associated with higher transcriptional risk score and enriched with eosinophil and natural killer T (NKT) cell gene signatures. Pathway analyses using this unique gene signature indicated eukaryotic initiation factor 2 (EIF2) and cyclic adenosine monophosphate (cAMP) signaling as dominant pathways associated with CD3, suggesting that modulators of these pathways may provide a promising therapeutic strategy for CD3 patients.

[0011] Therapeutic targets for the treatment of IBD were identified by analysis of the genetic contribution to the susceptibility of a patient developing CD. Among the targets identified are Adenylate cyclase 7 (ADCY7) and phosphodiesterase 4C (PDE4C). ADCY7 and members of the PDE4 family modulate innate immune responses through G-protein coupled receptor (GPCR) signaling. ADCY7 catalyzes the formation of cAMP in response to GPCR activation, which serves to control the innate immune response. The PDE4 family, composed of four subfamilies encoded by four paralog genes (e.g, PDE4A, PDE4B, PDE4C, and PDE4D), are cAMP-degrading isozymes in most, if not all, inflammatory cells.

[0012] The genetic polymorphisms or genotypes described herein, and the transcriptomic risk profiles provided herein, are associated with, and therefore predictive of, severe and refractory forms of inflammatory diseases and conditions, such as IBD. The genotypes and transcriptomic risk profiles may be detected in a sample containing genetic material obtained from the subject (e.g., whole blood, tissue, saliva). The detection of the risk genotypes or transcriptomic risk profiles may be detected at the point of need or at a medical healthcare facility. The genetic polymorphisms or genotypes are useful for identifying a subject who may be at risk for developing a severe or refractory form of IBD (e.g, “risk genotype”). In some cases, atranscriptomic profile may be used to identify a subject at risk for developing the severe or refractory disease (e.g., “transcriptomic risk profile). In addition, these risk genotypes and transcriptomic risk profiles described herein, can be used to select a patient for treatment with a therapeutic agent disclosed herein (e.g., agonist of ADCY7 and/or inhibitor of PDE4C).

[0013] Aspects disclosed here provide methods of treating an inflammatory bowel disease, the method comprising: (a) identifying a presence of a transcriptomic risk signature predictive of a severe or refractory form of inflammatory bowel disease (IBD) in a subject by assaying a sample obtained from the subject to detect a presence of a risk genotype comprising a single nucleotide polymorphism (SNP) selected from the group consisting of an “A” at rs7958372, a “C” at rs2877453, an “A” at rs71327010, a “C” at rs1169302C, a “G” at rs1169303, an “A” at rs6519183, a “C” at rs685548, an “A” at rs11998187, an “A” at rs531819A, a “G” at rs1041968, a “G” at rs693, an “A” at rs512535, a “G” at rs550619G, an “A” at rs570877, a “G” at rs12713956, an “A” at rs2301723, an “A” at rs2499714, an “A” at rs6583176, an “A” at rs369880, a “G” at rs57884093, an “A” at rs989690, an “A” at rs7704116, an “A” at rs12984273, a “G” at rs16891235, a “C” at rs7296651, an “A” at is rs516535, an “A” at rs9276427, an “A” at rs296564, an “A” at rs296569, an “A” at rs296568, a “G” at rs296567, a “G” at rs296561, a “G” at rs72749142, an “A” at rs9291547, an “A” at rs10761532, an “A” at rs10821813, a “C” at rs1561852, an “A” at rs10994464, a “G” at rs993402, an “A” at rs10994467, an “A” at rs10821822, a “G” at rs1837949, a “C” at rs35597961, a “G” at rs10821830, an “A” at rs975262, an “A” at rs973067, a “G” at rs10509139, an “A” at rs1442539, an “A” at rs2197155, a “G” at rs7919914, a “G” at rs10994476, an “A” at rs35471473, a “G” at rs12785023, a “G” at rs12783716, a “G” at rs10821821, a “G” at rs10994441, a “C” at rs10994442, a “T” at rs10821814, an “A” at rs10994465, a “T” at rs12218617, a “C” at rs10509138, an “A” at rs61854518, a “G” at rs10821699, a “G” at rs7919274, an “A” at rs10761552, a “G” at rs17037425, an “A” at rs2893861, a “C” at rs1993939, a “G” at rs10821833, a “G” at rs1904418, a “G” rs16915196, an “A” at rs61853514, an “A” at rs10994430, an “A” at rs16915231, a “G” at rs2028564, a “G” at rs13196552, an “A” at rs17587597, an “A” at rs17587226, an “A” at rs2276917, an “A” at rs10013653, an “A” at rs11582799, an “A” at rs111692854, and an “A” at rs72632053; and (b) administering to the subject a therapeutically effective amount of a therapeutic agent, the therapeutic agent comprising at least one of an inhibitor of PDE4C activity or expression inhibitor and an agonist of ADCY7, provided the transcriptomic risk signature is detected in (a). In some embodiments, the IBD is Crohn's disease (CD). In some embodiments, the IBD is ileal CD. In some embodiments, the subject is, or is suspected to be, non-responsive to a standard therapy selected from the group consisting of anti-tumor necrosis factor (TNF) alpha therapy, anti-a4-b7 therapy (vedolizumab), anti-IL12p40 therapy (ustekinumab), Thalidomide, Cytoxin, and a combination thereof. In some embodiments, the risk genotype further comprises at least two SNPs selected from the group consisting of the “A” at rs7958372, the “C” at rs2877453, the “A” at rs71327010, the “C” at rs1169302C, the “G” at rs1169303, the “A” at rs6519183, the “C” at rs685548, the “A” at rs11998187, the “A” at rs531819A, the “G” at rs1041968, the “G” at rs693, the “A” at rs512535, the “G” at rs550619G, the “A” at rs570877, the “G” at rs12713956, the “A” at rs2301723, the “A” at rs2499714, the “A” at rs6583176, the “A” at rs369880, the “G” at rs57884093, the “A” at rs989690, the “A” at rs7704116, the “A” at rs12984273, the “G” at rs16891235, the “C” at rs7296651, the “A” at is rs516535, the “A” at rs9276427, the “A” at rs296564, the “A” at rs296569, the “A” at rs296568, the “G” at rs296567, the “G” at rs296561, the “G” at rs72749142, the “A” at rs9291547, the “A” at rs10761532, the “A” at rs10821813, the “C” at rs1561852, the “A” at rs10994464, the “G” at rs993402, the “A” at rs10994467, the “A” at rs10821822, the “G” at rs1837949, the “C” at rs35597961, the “G” at rs10821830, the “A” at rs975262, the “A” at rs973067, the “G” at rs10509139, the “A” at rs1442539, the “A” at rs2197155, the “G” at rs7919914, the “G” at rs10994476, the “A” at rs35471473, the “G” at rs12785023, the “G” at rs12783716, the “G” at rs10821821, the “G” at rs10994441, the “C” at rs10994442, the “T” at rs10821814, the “A” at rs10994465, the “T” at rs12218617, the “C” at rs10509138, the “A” at rs61854518, the “G” at rs10821699, the “G” at rs7919274, the “A” at rs10761552, the “G” at rs17037425, the “A” at rs2893861, the “C” at rs1993939, the “G” at rs10821833, the “G” at rs1904418, the “G” rs16915196, the “A” at rs61853514, the “A” at rs10994430, the “A” at rs16915231, the “G” at rs2028564, the “G” at rs13196552, the “A” at rs17587597, the “A” at rs17587226, the “A” at rs2276917, the “A” at rs10013653, the “A” at rs11582799, the “A” at rs111692854, and the “A” at rs72632053. In some embodiments, methods further comprise assaying a sample obtained from the subject to detect a transcriptomic risk signature, the transcriptomic risk signature comprising:
[0014] (a) a high level of expression of at least one of X-C motif chemokine receptor 1 (XCR1), HNF1 homeobox A (HNF1A), metabotropic receptor 4 (GRM4), cholinergic receptor muscannic 3 (CHRM3), phosphodiesterase 4C (PDE4C), protein kinase C alpha (PRKCA), phosphatidylinositol-4-phosphate 5-kinase type 1 gamma (PIP5K1C), histone cluster 1 H1 family member A (HIST1H1A), and kinesin family member 21B (KIF21B), as compared to a reference level; and
[0015] (b) a low level of expression of at least one of ribosomal protein L3 (RPL3), protein tyrosine phosphatase, non-receptor type 11 (PTPN11), ribosomal protein (RL30), cholinergic receptor muscarinic 3 (CHRM3), DLC1 Rho GTPase activating protein (DLC1), apolipoprotein B (APOB), ribosomal protein L6 (RPL6), p21 (RAC1) activated kinase 2 (PAK2), ribosomal protein L18 (RPL18), protein phosphatase 2 catalytic subunit alpha (PPP2CA), Aldehyde Dehydrogenase 2 Family Member (ALDH2), bromodomain containing 2 (BRD2), major histocompatibility complex, class II, DQ alpha 2 (HLA-DQA2), Protocadherin 7 (PCDH7), Ankyrin 3 (ANK3), Tripartite Motif Containing 38 (TRIM38), and Cytochrome P450 Family 4 Subfamily V Member 2 (CYP4V2), Vesicle Associated Membrane Protein 3 (VAMP3), as compared to a reference level. In some embodiments, the presence of the risk genotype is indicative of a presence of the transcriptomic risk signature, the transcriptomic risk signature comprising:
[0016] (a) a high level of expression of at least one of XCR1, HNF1A, GRM4, CHRM3, PDE4C, PRKCA, PIP5K1C, HIST1H1A, and KIF21B, as compared to a reference level; and (b) a low level of expression of at least one of RPL3, PTPN11, RPL30, DLC1, APOB, RPL6, PAK2, RPL18, PPP2CA, ALDH2, BRD2, HLA-DQA2, PCDH7, ANK3, TRIM38, CYP4V2, and VAMP3, as compared to a reference level. In some embodiments, the reference value is derived from a level of expression in a non-diseased individual. In some embodiments, the subject is human.

[0017] Aspects disclosed here provide methods of treating an inflammatory bowel disease (IBD), the method comprising: (a) identifying a presence of a transcriptomic risk signature predictive of a severe or refractory form of the IBD in a subject by assaying a sample obtained from the subject to detect a presence of transcriptomic risk signature comprising:
[0018] (i) a high level of expression of at least one XCR1, HNF1A, GRM4, CHRM3, PDE4C, PRKCA, PIP5K1C, HIST1H1A, and KIF21B, as compared to a reference level; and
[0019] (ii) a low level of expression of at least one of RPL3, PTPN11, RPL30, DLC1, APOB, RPL6, PAK2, RPL18, PPP2CA, ALDH2, BRD2, HLA-DQA2, PCDH7, ANK3, TRIM38, CYP4V2, and VAMP3, as compared to a reference level; and (b) administering to the subject a therapeutically effective amount of a therapeutic agent, the therapeutic agent comprising at least one of an inhibitor of PDE4C activity or expression inhibitor and an agonist of ADCY7, provided the presence of the transcriptomic risk signature is detected in (a). In some embodiments, the IBD is CD. In some embodiments, the CD is perianal CD. In some embodiments, the CD is ileal CD. In some embodiments, the reference value is derived from a level of expression in a non-diseased individual. In some embodiments, the subject is human. In some embodiments, the level of expression is a level of mRNA expression. In some embodiments, the level of expression is a level of protein expression.

[0020] Aspects disclosed here provide methods of treating a CD in a subject comprising administering a therapeutically effective amount of at least one of an inhibitor of PDE4C activity or expression inhibitor and an agonist of ADCY7 to the subject, provided a risk genotype comprising a SNP selected from the group consisting of an “A” at rs7958372, a “C” at rs2877453, an “A” at rs71327010, a “C” at rs1169302C, a “G” at rs1169303, an “A” at rs6519183, a “C” at rs685548, an “A” at rs11998187, an “A” at rs531819A, a “G” at rs1041968, a “G” at rs693, an “A” at rs512535, a “G” at rs550619G, an “A” at rs570877, a “G” at rs12713956, an “A” at rs2301723, an “A” at rs2499714, an “A” at rs6583176, an “A” at rs369880, a “G” at rs57884093, an “A” at rs989690, an “A” at rs7704116, an “A” at rs12984273, a “G” at rs16891235, a “C” at rs7296651, an “A” at is rs516535, an “A” at rs9276427, an “A” at rs296564, an “A” at rs296569, an “A” at rs296568, a “G” at rs296567, a “G” at rs296561, a “G” at rs72749142, an “A” at rs9291547, an “A” at rs10761532, an “A” at rs10821813, a “C” at rs1561852, an “A” at rs10994464, a “G” at rs993402, an “A” at rs10994467, an “A” at rs10821822, a “G” at rs1837949, a “C” at rs35597961, a “G” at rs10821830, an “A” at rs975262, an “A” at rs973067, a “G” at rs10509139, an “A” at rs1442539, an “A” at rs2197155, a “G” at rs7919914, a “G” at rs10994476, an “A” at rs35471473, a “G” at rs12785023, a “G” at rs12783716, a “G” at rs10821821, a “G” at rs10994441, a “C” at rs10994442, a “T” at rs10821814, an “A” at rs10994465, a “T” at rs12218617, a “C” at rs10509138, an “A” at rs61854518, a “G” at rs10821699, a “G” at rs7919274, an “A” at rs10761552, a “G” at rs17037425, an “A” at rs2893861, a “C” at rs1993939, a “G” at rs10821833, a “G” at rs1904418, a “G” rs16915196, an “A” at rs61853514, an “A” at rs10994430, an “A” at rs16915231, a “G” at rs2028564, a “G” at rs13196552, an “A” at rs17587597, an “A” at rs17587226, an “A” at rs2276917, an “A” at rs10013653, an “A” at rs11582799, an “A” at rs111692854, and an “A” at rs72632053, is detected in a sample obtained from the subject. In some embodiments, the risk genotype further comprises at least two SNPs selected from the group consisting of the “A” at rs7958372, the “C” at rs2877453, the “A” at rs71327010, the “C” at rs1169302C, the “G” at rs1169303, the “A” at rs6519183, the “C” at rs685548, the “A” at rs11998187, the “A” at rs531819A, the “G” at rs1041968, the “G” at rs693, the “A” at rs512535, the “G” at rs550619G, the “A” at rs570877, the “G” at rs12713956, the “A” at rs2301723, the “A” at rs2499714, the “A” at rs6583176, the “A” at rs369880, the “G” at rs57884093, the “A” at rs989690, the “A” at rs7704116, the “A” at rs12984273, and the “G” at rs16891235, the “C” at rs7296651, the “A” at is rs516535, the “A” at rs9276427, the “A” at rs296564, the “A” at rs296569, the “A” at rs296568, the “G” at rs296567, the “G” at rs296561, the “G” at rs72749142, the “A” at rs9291547, the “A” at rs10761532, the “A” at rs10821813, the “C” at rs1561852, the “A” at rs10994464, the “G” at rs993402, the “A” at rs10994467, the “A” at rs10821822, the “G” at rs1837949, the “C” at rs35597961, the “G” at rs10821830, the “A” at rs975262, the “A” at rs973067, the “G” at rs10509139, the “A” at rs1442539, the “A” at rs2197155, the “G” at rs7919914, the “G” at rs10994476, the “A” at rs35471473, the “G” at rs12785023, the “G” at rs12783716, the “G” at rs10821821, the “G” at rs10994441, the “C” at rs10994442, the “T” at rs10821814, the “A” at rs10994465, the “T” at rs12218617, the “C” at rs10509138, the “A” at rs61854518, the “G” at rs10821699, the “G” at rs7919274, the “A” at rs10761552, the “G” at rs17037425, the “A” at rs2893861, the “C” at rs1993939, the “G” at rs10821833, the “G” at rs1904418, the “G” rs16915196, the “A” at rs61853514, the “A” at rs10994430, the “A” at rs16915231, the “G” at rs2028564, the “G” at rs13196552, the “A” at rs17587597, the “A” at rs17587226, the “A” at rs2276917, the “A” at rs10013653, the “A” at rs11582799, the “A” at rs111692854, and the “A” at rs72632053, is detected in a sample obtained from the subject. In some embodiments, a transcriptomic risk signature is detected in a sample obtained from the subject, the transcriptomic risk signature comprising:
[0021] (a) a high level of expression of at least one of XCR1, HNF1A, GRM4, CHRM3, PDE4C, PRKCA, PIP5K1C, HIST1H1A, and KIF21B, as compared to a reference level; and
[0022] (b) a low level of expression of at least one of RPL3, PTPN11, RPL30, DLC1, APOB, RPL6, PAK2, RPL18, PPP2CA, ALDH2, BRD2, HLA-DQA2, PCDH7, ANK3, TRIM38, CYP4V2, and VAMP3, as compared to a reference level. A In some embodiments, the CD is ileal CD. In some embodiments, the CD is refractory CD. In some embodiments, the CD is perianal CD. In some embodiments, the subject is selected for treatment because the subject is, or is suspected to be, non-responsive to a standard therapy selected from the group consisting of anti-tumor necrosis factor (TNF) alpha therapy, anti-a4-b7 therapy (vedolizumab), anti-IL12p40 therapy (ustekinumab), Thalidomide, Cytoxin, and a combination thereof. In some embodiments, the subject is human. In some embodiments, the level of expression is a level of mRNA expression. In some embodiments, the level of expression is a level of protein expression.

[0023] Aspects disclosed here provide methods of characterizing an inflammatory bowel disease, the method comprising: (a) obtaining a sample comprising genetic material from a subject having an inflammatory bowel disease; (b) providing a nucleic acid molecule comprising a detectable moiety, the nucleic acid molecule comprising a nucleic acid sequence that is capable of hybridizing to a risk genotype comprising a SNP selected from the group consisting of an “A” at rs7958372, a “C” at rs2877453, an “A” at rs71327010, a “C” at rs1169302C, a “G” at rs1169303, an “A” at rs6519183, a “C” at rs685548, an “A” at rs11998187, an “A” at rs531819A, a “G” at rs1041968, a “G” at rs693, an “A” at rs512535, a “G” at rs550619G, an “A” at rs570877, a “G” at rs12713956, an “A” at rs2301723, an “A” at rs2499714, an “A” at rs6583176, an “A” at rs369880, a “G” at rs57884093, an “A” at rs989690, an “A” at rs7704116, an “A” at rs12984273, a “G” at rs16891235, a “C” at rs7296651, an “A” at is rs516535, an “A” at rs9276427, an “A” at rs296564, an “A” at rs296569, an “A” at rs296568, a “G” at rs296567, a “G” at rs296561, a “G” at rs72749142, an “A” at rs9291547, an “A” at rs10761532, an “A” at rs10821813, a “C” at rs1561852, an “A” at rs10994464, a “G” at rs993402, an “A” at rs10994467, an “A” at rs10821822, a “G” at rs1837949, a “C” at rs35597961, a “G” at rs10821830, an “A” at rs975262, an “A” at rs973067, a “G” at rs10509139, an “A” at rs1442539, an “A” at rs2197155, a “G” at rs7919914, a “G” at rs10994476, an “A” at rs35471473, a “G” at rs12785023, a “G” at rs12783716, a “G” at rs10821821, a “G” at rs10994441, a “C” at rs10994442, a “T” at rs10821814, an “A” at rs10994465, a “T” at rs12218617, a “C” at rs10509138, an “A” at rs61854518, a “G” at rs10821699, a “G” at rs7919274, an “A” at rs10761552, a “G” at rs17037425, an “A” at rs2893861, a “C” at rs1993939, a “G” at rs10821833, a “G” at rs1904418, a “G” rs16915196, an “A” at rs61853514, an “A” at rs10994430, an “A” at rs16915231, a “G” at rs2028564, a “G” at rs13196552, an “A” at rs17587597, an “A” at rs17587226, an “A” at rs2276917, an “A” at rs10013653, an “A” at rs11582799, an “A” at rs111692854, and an “A” at rs72632053; (c) contacting the nucleic acid molecule to the sample obtained from the subject; (d) detecting a hybridization complex between the nucleic acid molecule and the risk genotype; and (e) characterizing the inflammatory bowel disease as a severe form of Crohn's disease (CD). In some embodiments, the risk genotype further comprises at least two SNPs selected from the group consisting of the “A” at rs7958372, the “C” at rs2877453, the “A” at rs71327010, the “C” at rs1169302C, the “G” at rs1169303, the “A” at rs6519183, the “C” at rs685548, the “A” at rs11998187, the “A” at rs531819A, the “G” at rs1041968, the “G” at rs693, the “A” at rs512535, the “G” at rs550619G, the “A” at rs570877, the “G” at rs12713956, the “A” at rs2301723, the “A” at rs2499714, the “A” at rs6583176, the “A” at rs369880, the “G” at rs57884093, the “A” at rs989690, the “A” at rs7704116, the “A” at rs12984273, and the “G” at rs16891235, the “C” at rs7296651, the “A” at is rs516535, the “A” at rs9276427, the “A” at rs296564, the “A” at rs296569, the “A” at rs296568, the “G” at rs296567, the “G” at rs296561, the “G” at rs72749142, the “A” at rs9291547, the “A” at rs10761532, the “A” at rs10821813, the “C” at rs1561852, the “A” at rs10994464, the “G” at rs993402, the “A” at rs10994467, the “A” at rs10821822, the “G” at rs1837949, the “C” at rs35597961, the “G” at rs10821830, the “A” at rs975262, the “A” at rs973067, the “G” at rs10509139, the “A” at rs1442539, the “A” at rs2197155, the “G” at rs7919914, the “G” at rs10994476, the “A” at rs35471473, the “G” at rs12785023, the “G” at rs12783716, the “G” at rs10821821, the “G” at rs10994441, the “C” at rs10994442, the “T” at rs10821814, the “A” at rs10994465, the “T” at rs12218617, the “C” at rs10509138, the “A” at rs61854518, the “G” at rs10821699, the “G” at rs7919274, the “A” at rs10761552, the “G” at rs17037425, the “A” at rs2893861, the “C” at rs1993939, the “G” at rs10821833, the “G” at rs1904418, the “G”rs16915196, the “A” at rs61853514, the “A” at rs10994430, the “A” at rs16915231, the “G” at rs2028564, the “G” at rs13196552, the “A” at rs17587597, the “A” at rs17587226, the “A” at rs2276917, the “A” at rs10013653, the “A” at rs11582799, the “A” at rs111692854, and the “A” at rs72632053. In some embodiments, the presence of the risk genotype is indicative of a presence of the transcriptomic risk signature, the transcriptomic risk signature comprising: (a) a high level of expression of at least one of XCR1, HNF1A, GRM4, CHRM3, PDE4C, PRKCA, PIP5K1C, HIST1H1A, and KIF21B, as compared to a reference level; and (b) a low level of expression of at least one of RPL3, PTPN11, RPL30, DLC1, APOB, RPL6, PAK2, RPL18, PPP2CA, ALDH2, BRD2, HLA-DQA2, PCDH7, ANK3, TRIM38, CYP4V2, and VAMP3, as compared to a reference level. In some embodiments, the CD is refractory CD. In some embodiments, the CD is perianal CD. In some embodiments, the detectable moiety is a fluorophore, and wherein the nucleic acid optionally comprises a quencher molecule. In some embodiments, methods further comprise selecting the subject for treatment with a therapeutic agent comprising at least one of an inhibitor of PDE4C activity or expression inhibitor and an agonist of ADCY7. In some embodiments, the subject is human.

[0024] Aspects disclosed here provide methods of characterizing an inflammatory bowel disease, the method comprising: (a) obtaining a sample comprising genetic material from a subject having an inflammatory bowel disease; (b) detecting a transcriptomic risk signature comprising:
[0025] (a) a high level of expression of at least one XCR1, HNF1A, GRM4, CHRM3, PDE4C, PRKCA, PIP5K1C, HIST1H1A, and KIF21B, as compared to a reference level; and
[0026] (b) alow level of expression of at least one of RPL3, PTPN11, RPL30, DLC1, APOB, RPL6, PAK2, RPL18, PPP2CA, ALDH2, BRD2, HLA-DQA2, PCDH7, ANK3, TRIM38, CYP4V2, and VAMP3, as compared to a reference level; (c) contacting the nucleic acid molecule to the sample obtained from the subject; (d) detecting a hybridization complex between the nucleic acid molecule and the one or more genes; and (e) characterizing the inflammatory bowel disease as a severe form of Crohn's disease (CD). In some embodiments, the CD is perianal CD. In some embodiments, the CD is ileal CD. In some embodiments, the detectable moiety is a fluorophore, and wherein the nucleic acid optionally comprises a quencher molecule. In some embodiments, methods further comprise selecting the subject for treatment with a therapeutic agent comprising at least one of an inhibitor of PDE4C activity or expression inhibitor and an agonist of ADCY7. In some embodiments, the subject is human. In some embodiments, the level of expression is a level of mRNA expression.

[0027] Aspects disclosed herein provide systems comprising: (a) a computer processing device, optionally connected to a computer network; and (b) a software module executed by the computer processing device to detect a transcriptomic risk signature by analyzing a sample for a presence and/or a level of expression of a gene or gene expression product, the gene selected from the group consisting of PTPN11, RPL30, XCR1, HNF1A, RPL3, CHRM3, DLC1, APOB, RPL6, GRM4, PAK2, RPL18, PDE4C, PRKCA, PPP2CA, PIP5K1C, HIST1H1A, ALDH2, BRD2, HLA-DQA2, KIF21B, PCDH7, ANK3, TRIM38, CYP4V2, VAMP3. In some embodiments, the transcriptomic risk signature comprises: (a) a high level of expression of at least one of XCR1, HNF1A, GRM4, CHRM3, PDE4C, PRKCA, PIP5K1C, HIST1H1A, and KIF21B, as compared to a reference level; and (b) a low level of expression of at least one of RPL3, PTPN11, RPL30, DLC1, APOB, RPL6, PAK2, RPL18, PPP2CA, ALDH2, BRD2, HLA-DQA2, PCDH7, ANK3, TRIM38, CYP4V2, and VAMP3, as compared to a reference level. In some embodiments, the reference level is a level of expression of the gene or gene expression product in a non-diseased individual. In some embodiments, a SNP at the gene is analyzed, the SNP selected from Table 2. In some embodiments, the SNP is selected from the group consisting of an “A” at rs7958372, a “C” at rs2877453, an “A” at rs71327010, a “C” at rs1169302C, a “G” at rs1169303, an “A” at rs6519183, a “C” at rs685548, an “A” at rs11998187, an “A” at rs531819A, a “G” at rs1041968, a “G” at rs693, an “A” at rs512535, a “G” at rs550619G, an “A” at rs570877, a “G” at rs12713956, an “A” at rs2301723, an “A” at rs2499714, an “A” at rs6583176, an “A” at rs369880, a “G” at rs57884093, an “A” at rs989690, an “A” at rs7704116, an “A” at rs12984273, a “G” at rs16891235, a “C” at rs7296651, an “A” at is rs516535, an “A” at rs9276427, an “A” at rs296564, an “A” at rs296569, an “A” at rs296568, a “G” at rs296567, a “G” at rs296561, a “G” at rs72749142, an “A” at rs9291547, an “A” at rs10761532, an “A” at rs10821813, a “C” at rs1561852, an “A” at rs10994464, a “G” at rs993402, an “A” at rs10994467, an “A” at rs10821822, a “G” at rs1837949, a “C” at rs35597961, a “G” at rs10821830, an “A” at rs975262, an “A” at rs973067, a “G” at rs10509139, an “A” at rs1442539, an “A” at rs2197155, a “G” at rs7919914, a “G” at rs10994476, an “A” at rs35471473, a “G” at rs12785023, a “G” at rs12783716, a “G” at rs10821821, a “G” at rs10994441, a “C” at rs10994442, a “T” at rs10821814, an “A” at rs10994465, a “T” at rs12218617, a “C” at rs10509138, an “A” at rs61854518, a “G” at rs10821699, a “G” at rs7919274, an “A” at rs10761552, a “G” at rs17037425, an “A” at rs2893861, a “C” at rs1993939, a “G” at rs10821833, a “G” at rs1904418, a “G” rs16915196, an “A” at rs61853514, an “A” at rs10994430, an “A” at rs16915231, a “G” at rs2028564, a “G” at rs13196552, an “A” at rs17587597, an “A” at rs17587226, an “A” at rs2276917, an “A” at rs10013653, an “A” at rs11582799, an “A” at rs111692854, and an “A” at rs72632053. In some embodiments, the SNP predictive of an upregulation or a downregulation of the gene, which is associated with a severe form of CD characteristic of CD3.

[0028] Aspects disclosed here provide kits: comprising a nucleic acid molecule comprising a detectable moiety and a nucleic acid sequence capable of hybridizing to a risk genotype or a gene in a transcriptomic risk signature. In some embodiments, the gene is selected from the group consisting of PTPN11, RPL30, XCR1, HNF1A, RPL3, CHRM3, DLC1, APOB, RPL6, GRM4, PAK2, RPL18, PDE4C, PRKCA, PPP2CA, PIP5K1C, HIST1H1A, ALDH2, BRD2, HLA-DQA2, KIF21B, PCDH7, ANK3, TRIM38, CYP4V2, VAMP3. In some embodiments, the risk genotype is selected from the group consisting of an “A” at rs7958372, a “C” at rs2877453, an “A” at rs71327010, a “C” at rs1169302C, a “G” at rs1169303, an “A” at rs6519183, a “C” at rs685548, an “A” at rs11998187, an “A” at rs531819A, a “G” at rs1041968, a “G” at rs693, an “A” at rs512535, a “G” at rs550619G, an “A” at rs570877, a “G” at rs12713956, an “A” at rs2301723, an “A” at rs2499714, an “A” at rs6583176, an “A” at rs369880, a “G” at rs57884093, an “A” at rs989690, an “A” at rs7704116, an “A” at rs12984273, a “G” at rs16891235, a “C” at rs7296651, an “A” at is rs516535, an “A” at rs9276427, an “A” at rs296564, an “A” at rs296569, an “A” at rs296568, a “G” at rs296567, a “G” at rs296561, a “G” at rs72749142, an “A” at rs9291547, an “A” at rs10761532, an “A” at rs10821813, a “C” at rs1561852, an “A” at rs10994464, a “G” at rs993402, an “A” at rs10994467, an “A” at rs10821822, a “G” at rs1837949, a “C” at rs35597961, a “G” at rs10821830, an “A” at rs975262, an “A” at rs973067, a “G” at rs10509139, an “A” at rs1442539, an “A” at rs2197155, a “G” at rs7919914, a “G” at rs10994476, an “A” at rs35471473, a “G” at rs12785023, a “G” at rs12783716, a “G” at rs10821821, a “G” at rs10994441, a “C” at rs10994442, a “T” at rs10821814, an “A” at rs10994465, a “T” at rs12218617, a “C” at rs10509138, an “A” at rs61854518, a “G” at rs10821699, a “G” at rs7919274, an “A” at rs10761552, a “G” at rs17037425, an “A” at rs2893861, a “C” at rs1993939, a “G” at rs10821833, a “G” at rs1904418, a “G” rs16915196, an “A” at rs61853514, an “A” at rs10994430, an “A” at rs16915231, a “G” at rs2028564, a “G” at rs13196552, an “A” at rs17587597, an “A” at rs17587226, an “A” at rs2276917, an “A” at rs10013653, an “A” at rs11582799, an “A” at rs111692854, and an “A” at rs72632053. In some embodiments, the detectable moiety is a fluorophore, and wherein the nucleic acid optionally comprises a quencher molecule.

[0029] Aspects disclosed herein provide methods of detecting a presence of a transcriptomic risk signature, the methods comprising: (a) contacting the nucleic acid molecule of the kits provided herein to a sample obtained from a subject; and (b) detecting a hybridization complex between the nucleic acid molecule and the risk genotype or a gene. In some embodiments, methods further comprise selecting the subject for treatment with a therapeutic agent comprising at least one of an inhibitor of PDE4C activity or expression inhibitor and an agonist of ADCY7.

### BRIEF DESCRIPTION OF THE DRAWINGS

[0030] The patent or application file contains at least one drawing executed in color. Copies of this patent or patent application publication with color drawing(s) will be provided by the Office upon request and payment of the necessary fee.

[0031] FIGS. 1A-1E shows the presence of three patient subgroups in small bowel resection mRNA expression. FIG. 1A shows a heatmap showing Pearson correlation coefficient between samples using normalized probe gene expression in SB85 cohort. FIG. 1B shows three sample clusters in the principle component analysis (PCA) plot using top three PCs in expression data in SB85 cohort. The sample clusters, CD1, CD2 and CD3 were detected using hierarchical and k-means clustering. FIG. 1C shows batch effect present in the two cohorts (left) was removed (right) while merged the cohorts to have better power in genetic and clinical phenotype associations. FIG. 1D shows the presence of the three CD patient subgroups confirmed in an expanded cohort (SB139) using k-means/hierarchical clustering. FIG. 1E shows a Gaussian model-based clustering method.

[0032] FIGS. 2A-2B shows the CD3 patient sub-group has faster disease recurrence and trending towards shorter time to second surgery compared to CD1. FIG. 2A shows that survival analysis (Gehan-Breslow-Wilcoxon test) using time from first surgery to recurrence or last follow-up of CD1, CD2, and CD3 clusters indicated proportion of recurrece free survival in CD3 cluster was smaller than CD1 in SB85 cohort (p=0.02, median survival time (months), CD1=10, CD2(8) and CD3=6. FIG. 2B shows the survival analysis using time from first to second surgery or last follow-up within five (5) years, which indicates greater proportion without a second surgery in CD1 compared to CD3 (marginally significant, p=0.08) in combined cohort of SB139.

[0033] FIG. 3 shows a class comparison of the three groups using probe-expression data of SB139 performed in BrB array tools indicated 4380 gene expression probes to be significantly DE (FDR <0.001). A gene was excluded if <20% of expression data had at least a 1.5 fold change in either direction from gene's median value. The black shade shows higher expression.

[0034] FIGS. 4A-4B shows cis-eQTL based pathway analysis and Transcriptional risk scores (TRS) underline transition to increasing disease risk from CD1 to CD3. FIG. 4A shows a comparison pathway analysis using eGenes from cis-eQTLs unique to either CD1 and CD3 (p<1e-08 for eQTL and p<0.05 for Fisher's exact test based pathway analysis) revealed that the CD3 sub-group is enriched in Wnt/beta-catenin signaling and regulation of EMT. This possibly indicates that the underlying pathobiology for recurring and complicated disease in CD3 could be changes in epithelial architecture. FIG. 4B shows association of TRS with the three subgroups (p<0.0001, Kruskal-Wallis (K-W) test). CD3 sub-group was associated with higher TRS compared to CD1 sub-group confirming CD3 as being more complicated and severe subgroup (p=0.0002, Mann-Whitney (M-W) test)

[0035] FIGS. 5A-5C shows cell-type specific signatures associated with the three sub-groups. FIG. 5A shows a statistical analysis of eosinophil (EOS) enrichment scores from xCell (ANOVA, p<0.0001) indicated significantly higher scores in CD3 sub-group while CD1 had the lowest score. Similar trend was obtained in NKT cells. The presence of EOS in the small bowel (SB) resected tissue were manually counted using H&E staining of FFPE slides for 67 out of the 139 patients (CD1=18, CD2=27 and CD3=22). FIG. 5B shows that a statistically significant difference in the eosinophil (EOS) counts across the three subgroups was not observed FIG. 5C shows enrichment of NKT cells in CD3 subgroup. Statistical analysis of NKT enrichment scores from xCell (ANOVA, p<0.0001) indicated significantly higher scores in CD3 sub-group while CD1 had the lowest score.

[0036] FIG. 6 shows ileal expression from CD patients who underwent a single small bowel resection shows CD subtypes associated with varying extent of recurrence free and complicated disease. Without being bound by a particular theoy, this suggests that the CD1 and CD3 subgroups are located on the opposite ends of refractory disease spectrum. Pathway analysis indicated that the more severe CD3 sub-type involved epithelial architecture changes driven by EMT (epithelial-mesenchymal transition) while CD1 was associated with chronic inflammation related pathways.

[0037] FIGS. 7A-7B shows validation of the presence of three subgroups in SB139 expression data using model-based clustering method implemented in “mclust” R-package. FIG. 7A optimal model (VVV) and number of clusters (three) determined using Bayesian information criterion (BIC). Best model is one with highest BIC score (VVV in this case). FIG. 7B shows classification of samples in the combined SB139 cohort using BIC-scatter plot with samples colored based on classification in a sub-group.

[0038] FIGS. 8A-8C shows a genotype association with the three sub-groups. A logistic regression was performed using genotype of the patients in the merged cohort (SB139) and the presence or absence of either CD1, CD2 and CD3 sub-groups. FIG. 8A shows a Manhattan plot for genetic associations with CD1 sub-group in SB139 samples. FIG. 8B shows a Manhattan plot for genetic associations with CD3 sub-groups in SB139 samples. The gene locus of top SNP on each chromosome with p<0.001 is shown in the Manhattan plots. FIG. 8C shows that the CD3 sub-group is associated with SNPs in DAPK1 gene, a previously reported pCD phenotype locus.

### DETAILED DESCRIPTION

[0039] Personalized therapeutic strategies are a promising solution to the unmet challenges of treating complex genetically and clinically heterogeneous disease, such as inflammatory diseases. The methods, systems, kits and compositions described herein practically apply the associations between a presence of the risk genotypes and/or transcriptomic risk profiles described herein and incidences of severe and refractory forms of inflammatory diseases and disorders, such as inflammatory bowel disease (IBD), in an effort to meet these unmet challenges. The risk genotypes and/or transcriptomic risk profiles of the present disclosure can be used to identify a subject as being at a high risk of developing an inflammatory disease or condition as compared to an individual who does not carry the risk genotype or transcriptomic risk signature. The genotypes are also useful to identify a patient previously diagnosed with some form of an inflammatory disease or condition who may be at a high risk for developing a severe or refractory form of the disease, as compared to an individual with the disease or condition who does not carry the risk genotype or transcriptomic risk profile. The early identification of patients who are at a high risk for developing severe or refractory forms of disease, may be prescribed earlier and more aggressive treatment regimens. In addition, or alternatively, these patients may be prescribed a second-line therapies, such as those described herein (e.g., anti-PDE4 therapy, agonist of ADCY7), rather than a first line therapy, such as an anti-TNF therapy.

[0040] The risk genotypes and/or transcriptomic risk profiles disclosed herein are enriched for genes involved in the innate immune response, and in some cases, are associated with a variation in an expression of genes in these pathways. For example, the risk genotypes or transcriptomic risk profiles provided herein may be indicative of a variation in expression or an activity of ADCY7 and/or PDE4. In some cases, the risk genotypes and/or transcriptomic risk profiles can be used to identify a patient who may be suitable for treatment with a targeted ADCY7 and/or PDE4 therapy (e.g, a patient carrying a risk genotype associated with an increase in PDE4C may be suitable for a treatment with an ADCY7 agonist or anti-PDE4 therapy). Exemplary conditions include UC and CD. In some cases, a subject is administered a therapeutic agent (e.g, ADCY7 agonist, anti-PDE4 inhibitor) provided the risk genotype and/or transcriptomic risk profile disclosed herein is detected in a sample obtained from the subject.

[0041] Compositions and kits for detecting the risk genotypes and transcriptomic risk profiles described herein are provided as further exemplary practical applications. Suitable methods of using the compositions and kits described herein quantitative PCR (qPCR), sequencing methodologies, and microarray methodologies. The compositions disclosed herein may include, for example, primers suitable for amplifying a region of DNA of interest (e.g, a polymorphism), and/or detectable nucleic acid probes capable of hybridizing the DNA of interest, such that it may be visualized.

### I. METHODS

[0042] Methods are provided herein comprising selecting a subject for treatment of an inflammatory disease or condition with a modulator of phosphodiesterase 4 (PDE4) and/or an agonist of adenylate cyclase 7 (ADCY7) based on a presence of a risk genotype or transcriptomic risk profile. The risk genotype and transcriptomic risk profile are predictive of severe forms of the inflammatory disease or condition. In some cases, the inflammatory disease or disorder is treated by administering a therapeutically effective amount of the modulator of PDE4 and/or ADCY7 to the subject. An exemplary inflammatory disease or disorder is inflammatory bowel disease (IBD), such as Crohn's disease (CD) or ulcerative colitis (UC).

[0043] Further provided are methods of characterizing an inflammatory disease or condition in a subject based on the presence of the risk genotype and/or transcriptomic risk signature detected in a sample obtained from the subject. Suitable methods of detecting the risk genotype and transcriptomic risk profile are provided herein, which include quantitative polymerase chain reaction (qPCR). In some case, the subject is treated with a modulator of PDE4 and/or an agonist of ADCY7, provided that the inflammatory disease or condition is characterized as severe or refractory.

### A. Subject

[0044] The subject disclosed herein can be a mammal, such as for example a mouse, rat, guinea pig, rabbit, non-human primate, or farm animal. In some instances, the subject is human. In some instances, the subject is a patient who is diagnosed with the disease or condition disclosed herein. In some instances, the subject is not diagnosed with the disease or condition. In some instances, the subject is suffering from a symptom related to a disease or condition disclosed herein (e.g, abdominal pain, cramping, diarrhea, rectal bleeding, fever, weight loss, fatigue, loss of appetite, dehydration, and malnutrition, anemia, or ulcers).

[0045] In some embodiments, the subject is susceptible to, or is inflicted with, thiopurine toxicity, or a disease caused by thiopurine toxicity (such as pancreatitis or leukopenia). The subject may experience, or is suspected of experiencing, non-response or loss-of-response to a standard treatment (e.g., anti-TNF alpha therapy, anti-a4-b7 therapy (vedolizumab), anti-IL12p40 therapy (ustekinumab), Thalidomide, or Cytoxin). In alternative embodiments, the subject is determined to be responsive to a standard treatment.

### B. Disease or Condition

[0046] The disease or condition disclosed herein is at least one of an inflammatory disease, a fibrostenotic disease, and a fibrotic disease. Non-limiting examples of inflammatory diseases include diseases of the gastrointestinal (GI) tract, liver, gallbladder, and joints. In some cases, the inflammatory disease inflammatory bowel disease (IBD), Crohn's disease (CD), or ulcerative colitis, systemic lupus erythematosus (SLE), or rheumatoid arthritis. A subject may suffer from fibrosis, fibrostenosis, or a fibrotic disease, either isolated or in combination with an inflammatoiy disease. In some cases, the CD is obstructive CD. The obstructive CD may result from inflammation that has led to the formation of scar tissue in the intestinal wall (fibrostenosis) and/or swelling. In some cases, the CD is characterized by the presence of fibrotic and/or inflammatory strictures. The strictures may be determined by computed tomography enterography (CTE), and magnetic resonance imaging enterography (MRE). In some embodiments, the disease is primary sclerosing cholangitis (PSC). Exemplary methods of diagnosing PSC include magnetic resonance cholangiopancreatography (MRCP), liver function tests, and histology. Liver function tests are valuable in the laboratory workup, and may include measurement of levels of serum alkaline phosphatase, serum aminotransferase, gamma glutamyl transpeptidase, and the presence of hypergammaglobulinemia The disease or condition may comprise thiopurine toxicity, or a disease caused by thiopurine toxicity (such as pancreatitis or leukopenia). In further embodiments provided, the subject experiences non-response to an induction of a therapy, or a loss-of-response to the therapy after a successful induction of the therapy. Non-limiting examples of standard treatment include glucocorticosteriods, anti-TNF therapy, anti-a4-b7 therapy (vedolizumab), anti-IL12p40 therapy (ustekinumab), Thalidomide, and Cytoxin.

### C. Risk Genotypes

[0047] Disclosed herein, in some embodiments are genotypes that are detected in a sample obtained from a subject by analyzing the genetic material in the sample. In some instances, the subject may be human. In some embodiments, the genetic material is obtained from a subject having a disease or condition disclosed herein. In some cases, the genetic material is obtained from blood, serum, plasma, sweat, hair, tears, urine, and other techniques known by one of skill in the art. In some cases, the genetic material is obtained for abiopsy, e.g., from the intestinal track of the subject.

[0048] The genotypes of the present disclosure comprise genetic material that is deoxyribonucleic acid (DNA). In some instances, the genotype comprises a denatured DNA molecule or fragment thereof. In some instances, the genotype comprises DNA selected from: genomic DNA, viral DNA, mitochondrial DNA, plasmid DNA, amplified DNA, circular DNA, circulating DNA, cell-free DNA, or exosomal DNA. In some instances, the DNA is single-stranded DNA (ssDNA), double-stranded DNA, denaturing double-stranded DNA, synthetic DNA, and combinations thereof. The circular DNA may be cleaved or fragmented.

[0049] The genotypes disclosed herein comprise at least one polymorphisms at a gene or genetic locus described herein. In some instances, the gene or genetic locus comprises phosphodiesterase 4C (PDE4C). In some instances, the genotype comprises a particular polymorphism, a polymorphism in linkage disequilibrium (LD) therewith, or a combination thereof. In some cases, LD is defined by an r² of at least or about 0.70, 0.75, 0.80, 0.85, 0.90, or 0.1. The genotypes disclosed herein can comprise at least or about 1, 2, 3, 4, 5, 6, 7, 8, 9, 10, 11, 12, 13, 1 4, 15, 16, 17, 18, 19, 20, 21, 22, 23, 24, 25, 26, 27, 28, 29, 30, or more polymorphisms.

[0050] The polymorphisms described herein can be a single nucleotide polymorphism, or an indel (insertion/deletion). In some instances, the polymorphism is an insertion or a deletion of at least one nucleobase (e.g., an indel). In some instances, the genotype may comprise a copy number variation (CNV), which is a variation in a number of a nucleic acid sequence between individuals in a given population. In some instances, the CNV comprises at least or about two, three, four, five, six, seven, eight, nine, ten, twenty, thirty, forty or fifty nucleic acid molecules. In some instances, the genotype is heterozygous. In some instances, the genotype is homozygous.

[0051] In an aspect, provided herein, a risk genotype comprising one or more polymorphisms detected in a sample obtained from the subject is located at a gene locus involved in the mammalian innate and adaptive immune responses. In some embodiments, the gene locus is involved in the pathogenesis of inflammatory disease, such as IBD. In further embodiments, the gene locus is involved in autophagy, innate immunity, adaptive immunity, Wnt/beta-catenin signaling, the regulation of epithelial-mesenchymal transition, antigen presentation, or OX40 signaling. In some embodiments, the gene locus is involved in PDE4 mediated pathways, including EIF2 and cAMP signaling pathways. The gene locus may comprise a gene from Table 3 or Table 4.

[0052] In some embodiments, the polymorphisms within the risk genotypes are uniquely associated with an inflammatory disease clinical subgroup. In some embodiments, the polymorphism is at a gene locus of a gene that is differentially expressed in inflammatory disease clinical subgroups. In some embodiments, the clinical subgroup comprises subjects with inflammatory disease that is characterized by a less severe form of disease (CD1). Table 1 lists risk genotypes comprising polymorphisms that are associated with the CD1 subgroup. In some embodiments, the clinical subgroup comprises subjects with inflammatory disease that is characterized by a more severe form of disease (CD3). Table 2 lists risk genotypes comprising polymorphisms that are associated with the CD3 subgroup. In some embodiments the CD3 subgroup is characterized by a faster time between first surgery, and second surgery or last follow-up. In some embodiments, the CD3 subgroup is characterized as having more female patients than male patients. The CD3 subgroup, in some cases, is characterized by refractory disease.

[0053] As used herein, in Table 1 and Table 2, the term “gene” refers to the gene expression product that is up or down regulated in the CD1 cohort (Table 1) or CD3 cohort (Table 2). The abbreviation “CHR” refers to the human chromosome on which the polymorphism is located. The term “polymorphism” may be a single nucleotide polymorphism or an indel (e.g., insertion/deletion) located at a genetic locus associated with inflammatory bowel disease. The minor allele is indicated with “A1” and the major allele is indicated with “A2.” The allele indicated with “Risk” is the allele, the presence of which is associated with the phenotype of interest (e.g., fold change in expression of the gene). The term, “OR” stands for “Odds Ratio,” which represents the odds that an outcome (e.g., fold change in expression of the gene) will occur given a particular exposure (e.g., presence of the polymorphism) in a logistic regression analysis. If OR<1, the minor allele correlates to a reduced risk of a patient exhibiting the listed phenotype. If OR>1, the minor allele correlates to an increased risk of a patient exhibiting the listed phenotype. The “P” indicates P value, which represents the association of a presence of the polymorphism with the occurrence of a phenotype (e.g., fold change in expression of the gene).

[0054] In some embodiments, the polymorphisms provided in Table 1 or Table 2 are associated with a differential expression (e.g., a fold change in messenger RNA (mRNA)) of a gene between the CD3 and CD1 subgroups, listed in Table 1 or Table 2, respectively. In some cases, the mRNA level of expression is a level measured in a tissue sample obtained from the small bowel of a subject in the CD1 and CD3 subgroups, respectively. A negative fold change value indicates that the presence of the “risk” allele is associated with a downregulation of the “gene” in the CD1 (Table 1) or CD3 (Table 2) subgroup. A positive fold change value indicates that the presence of the “risk” allele is associated with an upregulation of the “gene” in the CD1 (Table 1) or CD3 (Table 2) subgroup.

[0055] A presence of a polymorphism provided herein that is detected in a sample (e.g., blood) obtained from a subject is predictive of a corresponding differential expression of the gene in the subject. In a non-limiting example, detection of an “A” allele at rs470119 is predictive of an upregulation of thymidine phosphorylase (TYMP) (P=4.73E-4), and a likelihood that the subject has less severe form of Crohn's disease (CD), as compared to an individual who does not carry the “A” allele at rs470119.

TABLE 1
Polymorphisms Unique to Inflammatory Disease CD1 Subgroup

| | FoldChange_ | | | | | | | |
|---|---|---|---|---|---|---|---|---|
| Gene | CD3vsCD1 | CHR | Polymorphism | A1 | A2 | Risk | OR | P |
| TYMP | 3.019 | 22 | rs470119 | A | G | A | 3.338 | 4.73E−04 |
| PACS1 | −2.613 | 11 | rs559298 | G | A | G | 5.834 | 9.24E−04 |
| CNNM2 | 2.008 | 10 | rs12764154 | C | A | C | 2.906 | 2.17E−03 |
| COL5A1 | −2.532 | 9 | rs4842139 | A | G | A | 3.929 | 3.29E−03 |
| CNNM2 | 2.008 | 10 | rs2297786 | A | G | A | 2.437 | 3.65E−03 |
| SLC9A3 | −1.548 | 5 | rs9764991 | G | A | G | 2.823 | 4.09E−03 |
| CNNM2 | 2.008 | 10 | rs10509757 | A | G | A | 2.375 | 4.37E−03 |
| CNNM2 | 2.008 | 10 | rs10748836 | A | G | A | 2.375 | 4.37E−03 |
| CNNM2 | 2.008 | 10 | rs10883824 | G | A | G | 2.375 | 4.37E−03 |
| CNNM2 | 2.008 | 10 | rs10883826 | G | A | G | 2.375 | 4.37E−03 |
| CNNM2 | 2.008 | 10 | rs1926034 | A | G | A | 2.375 | 4.37E−03 |
| CNNM2 | 2.008 | 10 | rs2275271 | G | A | G | 2.375 | 4.37E−03 |
| CNNM2 | 2.008 | 10 | rs4917994 | A | G | A | 2.375 | 4.37E−03 |
| CNNM2 | 2.008 | 10 | rs7914558 | A | G | A | 2.375 | 4.37E−03 |
| CNNM2 | 2.008 | 10 | rs943035 | G | A | G | 2.375 | 4.37E−03 |
| CNNM2 | 2.008 | 10 | rs943036 | G | A | G | 2.375 | 4.37E−03 |
| MAGI3 | −2.654 | 1 | rs6704188 | A | G | A | 2.952 | 5.35E−03 |
| MAGI3 | −2.654 | 1 | rs11102651 | G | A | G | 2.865 | 6.76E−03 |
| MAGI3 | −2.654 | 1 | rs12144505 | G | A | G | 7.08 | 6.91E−03 |
| MAGI3 | −2.654 | 1 | rs12117465 | A | G | A | 7.08 | 6.91E−03 |
| MAGI3 | −2.654 | 1 | rs17448063 | G | A | G | 7.08 | 6.91E−03 |
| MAGI3 | −2.654 | 1 | rs11102629 | C | A | C | 7.08 | 6.91E−03 |
| MAGI3 | −2.654 | 1 | rs12130729 | A | G | A | 7.08 | 6.91E−03 |
| MAGI3 | −2.654 | 1 | rs12145834 | A | C | A | 7.08 | 6.91E−03 |
| MAGI3 | −2.654 | 1 | rs17461007 | G | A | G | 7.08 | 6.91E−03 |
| MAGI3 | −2.654 | 1 | rs75402723 | G | A | G | 7.08 | 6.91E−03 |
| MAGI3 | −2.654 | 1 | rs75372342 | G | A | G | 7.08 | 6.91E−03 |
| MAGI3 | −2.654 | 1 | rs12131115 | A | G | A | 7.08 | 6.91E−03 |
| FYB | 1.898 | 5 | rs6896856 | A | G | A | 2.441 | 6.98E−03 |
| FYB | −2.353 | 5 | rs6896856 | A | G | A | 2.441 | 6.98E−03 |
| CFL1P1 | −2.819 | 10 | rs12775504 | C | A | A | 0.2285 | 7.00E−03 |
| PPARGC1B | −2.383 | 5 | rs10515638 | A | C | A | 3.912 | 7.06E−03 |
| MAGI3 | −2.654 | 1 | rs17507884 | G | A | G | 6.419 | 7.44E−03 |
| DTX3 | −3.054 | 12 | rs1806652 | A | G | A | 2.519 | 7.81E−03 |
| BAK1 | 2.131 | 6 | rs5745582 | A | G | A | 2.479 | 7.97E−03 |
| MAGI3 | −2.654 | 1 | rs2153977 | A | G | A | 2.663 | 8.49E−03 |
| MAGI3 | −2.654 | 1 | rs11102658 | G | C | G | 2.663 | 8.49E−03 |
| SSC5D | 2.498 | 19 | rs542186 | C | A | A | 0.4067 | 9.11E−03 |
| DAAM2 | 1.816 | 6 | rs2504803 | G | A | G | 2.532 | 9.47E−03 |
| DOCK10 | −2.615 | 2 | rs10933073 | G | A | A | 0.431 | 1.03E−02 |
| MTR | −1.944 | 1 | rs10158822 | C | A | A | 0.1463 | 1.04E−02 |
| MTR | −1.944 | 1 | rs1805087 | G | A | A | 0.1463 | 1.04E−02 |
| MAGI3 | −2.654 | 1 | rs10858002 | G | A | G | 2.591 | 1.06E−02 |
| MAGI3 | −2.654 | 1 | rs10858008 | A | G | A | 2.704 | 1.06E−02 |
| COL4A2 | −2.222 | 13 | rs2025906 | G | G | G | 0.4005 | 1.07E−02 |
| TNR | 4.657 | 1 | rs12082376 | A | C | A | 3.222 | 1.07E−02 |
| PECAM1 | −1.889 | 17 | rs2070783 | A | G | A | 2.272 | 1.16E−02 |
| SLAIN2 | −1.87 | 4 | rs7438704 | A | G | G | 0.3589 | 1.35E−02 |
| SLAIN2 | −2.333 | 4 | rs7438704 | A | G | G | 0.3589 | 1.35E−02 |
| KLHDC7B | 3.419 | 22 | rs131779 | A | G | A | 2.276 | 1.39E−02 |
| MAGI3 | −2.654 | 1 | rs12125741 | G | A | G | 5.336 | 1.43E−02 |
| MAGI3 | −2.654 | 1 | rs12130763 | C | A | C | 5.336 | 1.43E−02 |
| MAGI3 | −2.654 | 1 | rs17461231 | C | A | C | 5.336 | 1.43E−02 |
| GIT2 | −2.131 | 12 | rs2292354 | A | G | G | 0.3335 | 1.52E−02 |
| SMAD3 | −2.289 | 15 | rs1470002 | A | G | A | 2.193 | 1.62E−02 |
| SMAD3 | −2.332 | 15 | rs1470002 | A | G | A | 2.193 | 1.62E−02 |
| SMAD3 | −2.37 | 15 | rs1470002 | A | G | A | 2.193 | 1.62E−02 |
| SMAD3 | −2.389 | 15 | rs1470002 | A | G | A | 2.193 | 1.62E−02 |
| SMAD3 | −2.422 | 15 | rs1470002 | A | G | A | 2.193 | 1.62E−02 |
| SMAD3 | −2.428 | 15 | rs1470002 | A | G | A | 2.193 | 1.62E−02 |
| SMAD3 | −2.459 | 15 | rs1470002 | A | G | A | 2.193 | 1.62E−02 |
| SMAD3 | −2.499 | 15 | rs1470002 | A | G | A | 2.193 | 1.62E−02 |
| SMAD3 | −2.53 | 15 | rs1470002 | A | G | A | 2.193 | 1.62E−02 |
| SMAD3 | −2.556 | 15 | rs1470002 | A | G | A | 2.193 | 1.62E−02 |
| ST6GALNAC5 | 2.614 | 1 | rs199720 | G | A | A | 0.3603 | 1.70E−02 |
| SLC9A3 | −1.548 | 5 | rs11748410 | A | G | A | 3.113 | 1.72E−02 |
| MYO16 | 1.73 | 13 | rs9587731 | A | G | A | 2.768 | 1.77E−02 |
| TBX19 | 1.937 | 1 | rs1000533 | G | A | G | 2.333 | 1.79E−02 |
| PHLDB2 | 1.685 | 3 | rs1443078 | C | A | C | 3.455 | 1.80E−02 |
| LRRC4C | 2.118 | 11 | rs1158362 | A | C | C | 0.376 | 1.85E−02 |
| ULK1 | −2.038 | 12 | rs11615995 | G | A | A | 0.2769 | 1.88E−02 |
| COL4A2 | −2.222 | 13 | rs7317733 | A | C | A | 2.31 | 1.98E−02 |
| PCGF3 | −1.688 | 4 | rs4076064 | G | A | A | 0.2432 | 1.99E−02 |
| PCGF3 | −2.03 | 4 | rs4076064 | G | A | A | 0.2432 | 1.99E−02 |
| MTSS1 | 1.947 | 8 | rs3901290 | G | A | A | 0.1725 | 2.01E−02 |
| LCE1C | 3 | 1 | rs35436039 | A | G | G | 0.4249 | 2.02E−02 |
| LCE1C | 3 | 1 | rs17624493 | A | G | G | 0.4047 | 2.10E−02 |
| MSRA | −2.27 | 8 | rs4448276 | A | C | A | 2.206 | 2.27E−02 |
| GGNBP2 | 3.205 | 17 | rs9906189 | G | A | G | 1.974 | 2.27E−02 |
| ST8SIA2 | 3.756 | 15 | rs2168351 | G | A | G | 2.101 | 2.28E−02 |
| MAGI3 | −2.654 | 1 | rs1113523 | A | G | A | 2.401 | 2.33E−02 |
| S1PR2 | 2.402 | 19 | rs2288937 | G | A | G | 2.216 | 2.41E−02 |
| MAGI3 | −2.654 | 1 | rs1343630 | G | A | A | 0.3789 | 2.53E−02 |
| FMO1 | −2.768 | 1 | rs10912694 | G | A | A | 0.3679 | 2.56E−02 |
| MAGI3 | −2.654 | 1 | rs1343629 | C | G | G | 0.4664 | 2.59E−02 |
| VARS2 | 3.442 | 6 | rs7766094 | A | G | A | 3.558 | 2.60E−02 |
| MAGI3 | −2.654 | 1 | rs66602772 | G | A | A | 0.468 | 2.61E−02 |
| MAPK11 | 2.201 | 22 | rs2076139 | A | G | A | 2.248 | 2.63E−02 |
| BEST3 | 2.333 | 12 | rs4761251 | G | A | A | 0.4507 | 2.71E−02 |
| FAM71B | 2.615 | 5 | rs31220 | G | A | A | 0.2515 | 2.84E−02 |
| DOCK10 | −2.615 | 2 | rs1565073 | A | C | C | 0.4889 | 2.85E−02 |
| MAST2 | −1.506 | 1 | rs2236560 | A | G | A | 2.124 | 2.89E−02 |
| TNS3 | 1.902 | 7 | rs2692541 | A | C | C | 0.4691 | 2.94E−02 |
| MME | −2.42 | 3 | rs1836917 | G | A | G | 1.954 | 3.00E−02 |
| GPX4 | −2.286 | 19 | rs4807543 | A | C | A | 3.567 | 3.03E−02 |
| PSMA6 | −1.98 | 14 | rs12878391 | G | A | A | 0.3538 | 3.11E−02 |
| MTMR9LP | 2.681 | 1 | rs747020 | A | G | A | 2.738 | 3.12E−02 |
| MTMR9LP | −2.266 | 1 | rs747020 | A | G | A | 2.738 | 3.12E−02 |
| MAGI3 | −2.654 | 1 | rs4259646 | A | G | G | 0.4817 | 3.15E−02 |
| MAGI3 | −2.654 | 1 | rs6537790 | A | C | C | 0.4817 | 3.15E−02 |
| HLA−DOA | 2.801 | 6 | rs592625 | G | A | A | 0.3491 | 3.15E−02 |
| SLC9A3 | −1.548 | 5 | rs13181243 | A | C | A | 2.067 | 3.17E−02 |
| FKBP5 | −1.813 | 6 | rs4713899 | A | G | A | 2.242 | 3.23E−02 |
| FKBP5 | −2.153 | 6 | rs4713899 | A | G | A | 2.242 | 3.23E−02 |
| TCEA3 | −1.785 | 1 | rs4648892 | G | A | A | 0.344 | 3.29E−02 |
| LRRC4C | 2.118 | 11 | rs896617 | A | G | G | 0.4383 | 3.30E−02 |
| LRRC4C | 2.118 | 11 | rs896618 | G | A | A | 0.4383 | 3.30E−02 |
| MME | −2.42 | 3 | rs2016848 | A | G | A | 1.933 | 3.33E−02 |
| LOC728175 | 2.484 | 4 | rs76450153 | A | C | A | 2.693 | 3.34E−02 |
| MAGI3 | −2.654 | 1 | rs35390985 | A | G | G | 0.4843 | 3.38E−02 |
| MAGI3 | −2.654 | 1 | rs7554019 | A | G | G | 0.4843 | 3.38E−02 |
| CEP72 | 2.59 | 5 | rs74553530 | T | A | T | 2.414 | 3.42E−02 |
| TCF4 | −2.386 | 18 | rs1660241 | A | G | G | 0.437 | 3.43E−02 |
| VNN1 | −1.99 | 6 | rs3798792 | G | A | A | 0.442 | 3.45E−02 |
| PCGF3 | −1.688 | 4 | rs6838241 | C | A | A | 0.4193 | 3.50E−02 |
| PCGF3 | −2.03 | 4 | rs6838241 | C | A | A | 0.4193 | 3.50E−02 |
| PSMA6 | −1.98 | 14 | rs11621075 | G | A | A | 0.3636 | 3.56E−02 |
| NFIA | −2.008 | 1 | rs2474358 | A | G | G | 0.3387 | 3.57E−02 |
| NFIA | −2.244 | 1 | rs2474358 | A | G | G | 0.3387 | 3.57E−02 |
| HHAT | −1.744 | 1 | rs7548180 | G | A | G | 1.992 | 3.59E−02 |
| DKFZP434K028 | 2.118 | 11 | rs2238003 | A | G | A | 2.193 | 3.62E−02 |
| LCE1F | 3.218 | 1 | rs12239774 | A | G | G | 0.4629 | 3.65E−02 |
| WNK1 | −2.073 | 12 | rs12828016 | A | C | A | 1.903 | 3.67E−02 |
| HLA−DPA1 | −3.667 | 6 | rs7905 | G | A | A | 0.2691 | 3.68E−02 |
| SNAPC4 | −2.11 | 9 | rs10747031 | G | C | G | 1.977 | 3.69E−02 |
| TBX19 | 1.937 | 1 | rs17502484 | A | G | A | 2.018 | 3.74E−02 |
| NMD3 | −1.987 | 3 | rs4350933 | C | A | A | 0.4996 | 3.84E−02 |
| NMD3 | −1.987 | 3 | rs6794601 | G | A | A | 0.4996 | 3.84E−02 |
| LTB4R | 2.868 | 14 | rs1046587 | A | G | A | 1.962 | 3.85E−02 |
| MAGI3 | −2.654 | 1 | rs10858000 | A | G | A | 2.258 | 3.96E−02 |
| MAGI3 | −2.654 | 1 | rs11102648 | A | C | A | 2.258 | 3.96E−02 |
| MAGI3 | −2.654 | 1 | rs4456089 | A | G | A | 2.258 | 3.96E−02 |
| MAGI3 | −2.654 | 1 | rs10745339 | G | A | G | 2.258 | 3.96E−02 |
| MAGI3 | −2.654 | 1 | rs17013326 | A | G | A | 2.258 | 3.96E−02 |
| MAGI3 | −2.654 | 1 | rs12037873 | T | A | T | 2.258 | 3.96E−02 |
| MAGI3 | −2.654 | 1 | rs11102652 | A | G | A | 2.258 | 3.96E−02 |
| MAGI3 | −2.654 | 1 | rs12077419 | A | T | A | 2.258 | 3.96E−02 |
| MAGI3 | −2.654 | 1 | rs1343128 | A | G | A | 2.258 | 3.96E−02 |
| P4HA2 | −3.126 | 5 | rs156025 | A | G | G | 0.3995 | 3.96E−02 |
| LAT | 2.138 | 16 | rs1131543 | A | G | A | 2.133 | 3.98E−02 |
| IGFBP4 | −2.236 | 17 | rs584828 | A | G | A | 1.91 | 4.01E−02 |
| CNNM2 | 2.008 | 10 | rs12248123 | G | A | G | 1.894 | 4.03E−02 |
| ITPKB | −1.559 | 1 | rs3768414 | G | A | G | 2.075 | 4.03E−02 |
| ITPKB | −1.597 | 1 | rs3768414 | G | A | G | 2.075 | 4.03E−02 |
| IFNGR1 | −1.802 | 6 | rs11754268 | A | G | G | 0.4053 | 4.05E−02 |
| MAGI3 | −2.654 | 1 | rs2027536 | A | G | A | 2.18 | 4.15E−02 |
| MAGI3 | −2.654 | 1 | rs1343630 | A | T | A | 2.18 | 4.15E−02 |
| MAGI3 | −2.654 | 1 | rs11102627 | A | G | A | 2.18 | 4.15E−02 |
| MAGI3 | −2.654 | 1 | rs11102628 | A | G | A | 2.18 | 4.15E−02 |
| MAGI3 | −2.654 | 1 | rs11102647 | G | A | G | 2.18 | 4.15E−02 |
| SYMPK | 3.38 | 19 | rs10500292 | A | G | G | 0.4896 | 4.17E−02 |
| GPR17 | 1.739 | 2 | rs13021001 | G | A | G | 2.169 | 4.20E−02 |
| MBNL1 | −2.508 | 3 | rs17371539 | A | G | G | 0.1231 | 4.22E−02 |
| NMD3 | −1.987 | 3 | rs4273380 | A | G | G | 0.5048 | 4.24E−02 |
| NMD3 | −1.987 | 3 | rs4370045 | A | G | G | 0.5048 | 4.24E−02 |
| NMD3 | −1.987 | 3 | rs4597724 | A | G | G | 0.5048 | 4.24E−02 |
| SEMA3F | 1.881 | 3 | rs2859580 | G | A | A | 0.1213 | 4.25E−02 |
| CEP72 | 2.59 | 5 | rs3805416 | A | G | A | 2.315 | 4.32E−02 |
| MAGI3 | −2.654 | 1 | rs11579386 | G | C | G | 4.304 | 4.32E−02 |
| MAGI3 | −2.654 | 1 | rs56092022 | G | A | G | 4.304 | 4.32E−02 |
| MAGI3 | −2.654 | 1 | rs76658509 | A | G | A | 4.304 | 4.32E−02 |
| MAGI3 | −2.654 | 1 | rs17031640 | G | A | G | 4.304 | 4.32E−02 |
| MAGI3 | −2.654 | 1 | rs17031645 | G | A | G | 4.304 | 4.32E−02 |
| MAGI3 | −2.654 | 1 | rs17031648 | T | A | T | 4.304 | 4.32E−02 |
| MAGI3 | −2.654 | 1 | rs78838491 | A | G | A | 4.304 | 4.32E−02 |
| MAGI3 | −2.654 | 1 | rs7528311 | G | A | G | 4.304 | 4.32E−02 |
| MAGI3 | −2.654 | 1 | rs75016316 | G | A | G | 4.304 | 4.32E−02 |
| MAGI3 | −2.654 | 1 | rs6671518 | A | G | A | 4.304 | 4.32E−02 |
| MAGI3 | −2.654 | 1 | rs7553181 | A | C | A | 4.304 | 4.32E−02 |
| MAGI3 | −2.654 | 1 | rs7555259 | G | A | G | 4.304 | 4.32E−02 |
| SEMA3F | 1.881 | 3 | rs2624842 | C | A | A | 0.2138 | 4.34E−02 |
| IFT172 | −2.249 | 2 | rs1260345 | G | A | G | 1.802 | 4.39E−02 |
| SORCS3 | 4.436 | 10 | rs1565419 | G | C | G | 1.996 | 4.44E−02 |
| IL37 | 2.497 | 2 | rs3811047 | A | G | G | 0.4182 | 4.50E−02 |
| SLC9A3 | −1.548 | 5 | rs4957044 | C | A | C | 2.625 | 4.52E−02 |
| ARSB | 2.73 | 5 | rs13178105 | A | G | A | 2.233 | 4.57E−02 |
| ZNF609 | −2.576 | 15 | rs11631564 | A | G | A | 2.053 | 4.57E−02 |
| MAGI3 | −2.654 | 1 | rs11102649 | G | A | G | 2.203 | 4.60E−02 |
| VAV3 | −2.043 | 1 | rs2504469 | A | G | A | 1.926 | 4.62E−02 |
| MAGI3 | −2.654 | 1 | rs1217204 | C | G | C | 2.202 | 4.62E−02 |
| MAGI3 | −2.654 | 1 | rs1217237 | A | C | A | 2.202 | 4.62E−02 |
| MAGI3 | −2.654 | 1 | rs80218678 | G | A | G | 2.202 | 4.62E−02 |
| MAGI3 | −2.654 | 1 | rs10858011 | A | G | A | 2.202 | 4.62E−02 |
| MAGI3 | −2.654 | 1 | rs11102661 | A | G | A | 2.202 | 4.62E−02 |
| PPARGC1B | −2.383 | 5 | rs2010994 | A | G | G | 0.429 | 4.66E−02 |
| PPARGC1B | −2.383 | 5 | rs2012547 | A | G | G | 0.5251 | 4.70E−02 |
| FAM178B | 3.451 | 2 | rs7589232 | A | G | A | 1.998 | 4.70E−02 |
| BAK1 | 2.131 | 6 | rs210139 | C | A | C | 1.875 | 4.70E−02 |
| G6PC2 | 2.783 | 2 | rs560887 | A | G | A | 1.974 | 4.85E−02 |
| SMPD3 | −3.131 | 16 | rs12444619 | C | A | C | 2.059 | 4.96E−02 |

TABLE 2
Polymorphisms Unique to Inflammatory Disease CD3 Subgroup

| | FoldChange_ | | | | | | | |
|---|---|---|---|---|---|---|---|---|
| Gene | CD3vsCD1 | CHR | Polymorphism | A1 | A2 | Risk | OR | P |
| RPL3 | −2.361 | 22 | rs6519183 | A | G | A | 3.82 | 8.10E−04 |
| PSMD5 | 1.81 | 9 | rs12343516 | A | C | C | 0.2774 | 1.72E−03 |
| POU5F1 | −1.53 | 6 | rs2106074 | G | A | G | 3.068 | 1.88E−03 |
| TNXB | −1.643 | 6 | rs17421624 | G | A | A | 0.2593 | 2.13E−03 |
| TNXB | −1.643 | 6 | rs2071293 | A | G | G | 0.2593 | 2.13E−03 |
| CLPTM1L | 2.624 | 5 | rs401681 | A | G | G | 0.3243 | 2.23E−03 |
| MTTP | −2.052 | 4 | rs982424 | G | A | G | 8.54 | 2.28E−03 |
| GRM4 | 2.625 | 6 | rs2499714 | A | G | A | 4.365 | 2.84E−03 |
| CLPTM1L | 2.624 | 5 | rs31489 | A | C | C | 0.2979 | 2.91E−03 |
| PSMD5 | 1.81 | 9 | rs3793638 | C | A | A | 0.3035 | 2.94E−03 |
| PSMD5 | 1.81 | 9 | rs1060817 | A | G | G | 0.3035 | 2.94E−03 |
| PSMD5 | 1.81 | 9 | rs10760117 | A | C | C | 0.3035 | 2.94E−03 |
| PSMD5 | 1.81 | 9 | rs12684934 | G | A | A | 0.3035 | 2.94E−03 |
| TNXB | −1.643 | 6 | rs2857009 | C | G | G | 0.2924 | 2.98E−03 |
| OPCML | 3.91 | 11 | rs476840 | C | A | C | 3.888 | 3.39E−03 |
| GLB1 | −2.833 | 3 | rs9828592 | A | G | A | 2.815 | 3.42E−03 |
| TNXB | −1.643 | 6 | rs2071295 | A | G | G | 0.2995 | 3.43E−03 |
| TNXB | −1.643 | 6 | rs2239689 | A | G | G | 0.2995 | 3.43E−03 |
| TNXB | −1.643 | 6 | rs6902493 | A | G | G | 0.2995 | 3.43E−03 |
| TNXB | −1.643 | 6 | rs7766862 | A | G | G | 0.2995 | 3.43E−03 |
| ANK3 | −1.906 | 10 | rs10761532 | A | G | A | 3.056 | 3.58E−03 |
| ANK3 | −1.906 | 10 | rs10821813 | A | G | A | 3.056 | 3.58E−03 |
| ANK3 | −1.906 | 10 | rs1561852 | C | A | C | 3.056 | 3.58E−03 |
| ANK3 | −2.062 | 10 | rs10761532 | A | G | A | 3.056 | 3.58E−03 |
| ANK3 | −2.062 | 10 | rs10821813 | A | G | A | 3.056 | 3.58E−03 |
| ANK3 | −2.062 | 10 | rs1561852 | C | A | C | 3.056 | 3.58E−03 |
| CTSH | −1.638 | 15 | rs12441725 | A | G | A | 7.282 | 3.60E−03 |
| GLB1 | −2.833 | 3 | rs35570272 | A | C | C | 0.3291 | 3.62E−03 |
| GLB1 | −2.833 | 3 | rs7650543 | G | A | G | 2.759 | 3.76E−03 |
| CYP4V2 | −2.02 | 4 | rs2276917 | G | A | A | 0.3232 | 4.40E−03 |
| ATF6B | 2.094 | 6 | rs8111 | A | G | G | 0.2947 | 4.86E−03 |
| DNMT3A | 2.471 | 2 | rs72810046 | C | G | C | 3.738 | 4.97E−03 |
| AFF3 | 3.218 | 2 | rs7340465 | A | G | A | 2.806 | 7.14E−03 |
| ANK3 | −1.906 | 10 | rs10994464 | A | C | A | 2.763 | 7.31E−03 |
| ANK3 | −1.906 | 10 | rs993402 | G | A | G | 2.763 | 7.31E−03 |
| ANK3 | −1.906 | 10 | rs10994467 | A | G | A | 2.763 | 7.31E−03 |
| ANK3 | −1.906 | 10 | rs10821822 | A | G | A | 2.763 | 7.31E−03 |
| ANK3 | −1.906 | 10 | rs1837949 | G | A | G | 2.763 | 7.31E−03 |
| ANK3 | −1.906 | 10 | rs35597961 | C | A | C | 2.763 | 7.31E−03 |
| ANK3 | −1.906 | 10 | rs10821830 | G | A | G | 2.763 | 7.31E−03 |
| ANK3 | −1.906 | 10 | rs975262 | A | G | A | 2.763 | 7.31E−03 |
| ANK3 | −1.906 | 10 | rs973067 | A | G | A | 2.763 | 7.31E−03 |
| ANK3 | −1.906 | 10 | rs10509139 | G | A | G | 2.763 | 7.31E−03 |
| ANK3 | −1.906 | 10 | rs1442539 | A | C | A | 2.763 | 7.31E−03 |
| ANK3 | −1.906 | 10 | rs2197155 | A | G | A | 2.763 | 7.31E−03 |
| ANK3 | −1.906 | 10 | rs7919914 | G | C | G | 2.763 | 7.31E−03 |
| ANK3 | −2.062 | 10 | rs10994464 | A | C | A | 2.763 | 7.31E−03 |
| ANK3 | −2.062 | 10 | rs993402 | G | A | G | 2.763 | 7.31E−03 |
| ANK3 | −2.062 | 10 | rs10994467 | A | G | A | 2.763 | 7.31E−03 |
| ANK3 | −2.062 | 10 | rs10821822 | A | G | A | 2.763 | 7.31E−03 |
| ANK3 | −2.062 | 10 | rs1837949 | G | A | G | 2.763 | 7.31E−03 |
| ANK3 | −2.062 | 10 | rs35597961 | C | A | C | 2.763 | 7.31E−03 |
| ANK3 | −2.062 | 10 | rs10821830 | G | A | G | 2.763 | 7.31E−03 |
| ANK3 | −2.062 | 10 | rs975262 | A | G | A | 2.763 | 7.31E−03 |
| ANK3 | −2.062 | 10 | rs973067 | A | G | A | 2.763 | 7.31E−03 |
| ANK3 | −2.062 | 10 | rs10509139 | G | A | G | 2.763 | 7.31E−03 |
| ANK3 | −2.062 | 10 | rs1442539 | A | C | A | 2.763 | 7.31E−03 |
| ANK3 | −2.062 | 10 | rs2197155 | A | G | A | 2.763 | 7.31E−03 |
| ANK3 | −2.062 | 10 | rs7919914 | G | C | G | 2.763 | 7.31E−03 |
| ATF6B | 2.094 | 6 | rs2228628 | G | C | C | 0.3386 | 7.64E−03 |
| DNMT3A | 2.471 | 2 | rs2276598 | A | G | A | 3.321 | 7.89E−03 |
| SMG7 | −2.353 | 1 | rs10797885 | A | C | A | 3.861 | 8.39E−03 |
| SMG7 | −2.353 | 1 | rs72637285 | G | A | G | 3.861 | 8.39E−03 |
| PLBD1 | −3.224 | 12 | rs1862013 | G | A | G | 2.422 | 8.75E−03 |
| VAMP3 | −1.738 | 1 | rs11582799 | A | G | A | 3.974 | 8.84E−03 |
| VAMP3 | −1.738 | 1 | rs111692854 | A | G | A | 3.974 | 8.84E−03 |
| VAMP3 | −1.738 | 1 | rs72632053 | A | C | A | 3.974 | 8.84E−03 |
| POU5F1 | −1.53 | 6 | rs3130501 | A | G | A | 2.586 | 8.88E−03 |
| CTSH | −1.638 | 15 | rs7161986 | C | A | C | 5.263 | 8.98E−03 |
| CTSH | −1.638 | 15 | rs12440862 | G | A | G | 5.263 | 8.98E−03 |
| CTSH | −1.638 | 15 | rs3784537 | A | G | A | 5.263 | 8.98E−03 |
| CTSH | −1.638 | 15 | rs3784538 | A | G | A | 5.263 | 8.98E−03 |
| CTSH | −1.638 | 15 | rs3784540 | A | G | A | 5.263 | 8.98E−03 |
| CTSH | −1.638 | 15 | rs3825931 | A | G | A | 5.263 | 8.98E−03 |
| CTSH | −1.638 | 15 | rs8039683 | C | G | C | 5.263 | 8.98E−03 |
| CTSH | −1.638 | 15 | rs7163828 | C | G | C | 5.263 | 8.98E−03 |
| CTSH | −1.638 | 15 | rs2289697 | G | A | G | 5.263 | 8.98E−03 |
| CTSH | −1.638 | 15 | rs9302286 | G | A | G | 5.263 | 8.98E−03 |
| HIST1H1A | 2.77 | 6 | rs16891235 | G | A | G | 3.504 | 9.35E−03 |
| TRIM38 | −2.16 | 6 | rs13196552 | G | A | G | 3.504 | 9.35E−03 |
| THRB | 2.234 | 3 | rs7632903 | A | G | A | 2.523 | 9.71E−03 |
| GLB1 | −2.833 | 3 | rs34064757 | A | G | G | 0.3903 | 1.12E−02 |
| NELFE | −2.702 | 6 | rs760070 | G | A | G | 2.935 | 1.18E−02 |
| FOXO1 | 2.033 | 13 | rs2701865 | G | A | G | 3.054 | 1.27E−02 |
| FOXO1 | 2.033 | 13 | rs2701880 | C | A | C | 3.054 | 1.27E−02 |
| ANK3 | −1.906 | 10 | rs35471473 | A | G | A | 2.559 | 1.28E−02 |
| ANK3 | −1.906 | 10 | rs12785023 | G | A | G | 2.559 | 1.28E−02 |
| ANK3 | −1.906 | 10 | rs12783716 | G | A | G | 2.559 | 1.28E−02 |
| ANK3 | −1.906 | 10 | rs10821821 | G | A | G | 2.559 | 1.28E−02 |
| ANK3 | −2.062 | 10 | rs35471473 | A | G | A | 2.559 | 1.28E−02 |
| ANK3 | −2.062 | 10 | rs12785023 | G | A | G | 2.559 | 1.28E−02 |
| ANK3 | −2.062 | 10 | rs12783716 | G | A | G | 2.559 | 1.28E−02 |
| ANK3 | −2.062 | 10 | rs10821821 | G | A | G | 2.559 | 1.28E−02 |
| C19orf60 | 2.362 | 19 | rs10409392 | A | C | A | 2.425 | 1.32E−02 |
| SMG7-AS1 | 1.969 | 1 | rs16861076 | G | A | G | 3.475 | 1.34E−02 |
| SMG7 | −2.353 | 1 | rs72637284 | A | C | A | 3.475 | 1.34E−02 |
| SMG7 | −2.353 | 1 | rs12144253 | A | G | A | 3.475 | 1.34E−02 |
| SMG7 | −2.353 | 1 | rs3754519 | G | A | G | 3.475 | 1.34E−02 |
| POU5F1 | −1.53 | 6 | rs3130502 | A | G | A | 2.447 | 1.36E−02 |
| PDE4C | 2.673 | 19 | rs11670370 | A | G | A | 2.396 | 1.38E−02 |
| PDE4C | 2.673 | 19 | rs55887216 | G | C | G | 2.396 | 1.38E−02 |
| PDE4C | 2.259 | 19 | rs11670370 | A | G | A | 2.396 | 1.38E−02 |
| PDE4C | 2.259 | 19 | rs55887216 | G | C | G | 2.396 | 1.38E−02 |
| PDE4C | 2.223 | 19 | rs11670370 | A | G | A | 2.396 | 1.38E−02 |
| PDE4C | 2.223 | 19 | rs55887216 | G | C | G | 2.396 | 1.38E−02 |
| PDE4C | 2.146 | 19 | rs11670370 | A | G | A | 2.396 | 1.38E−02 |
| PDE4C | 2.146 | 19 | rs55887216 | G | C | G | 2.396 | 1.38E−02 |
| PDE4C | 2.128 | 19 | rs11670370 | A | G | A | 2.396 | 1.38E−02 |
| PDE4C | 2.128 | 19 | rs55887216 | G | C | G | 2.396 | 1.38E−02 |
| PDE4C | 2.107 | 19 | rs11670370 | A | G | A | 2.396 | 1.38E−02 |
| PDE4C | 2.107 | 19 | rs55887216 | G | C | G | 2.396 | 1.38E−02 |
| PDE4C | 2.046 | 19 | rs11670370 | A | G | A | 2.396 | 1.38E−02 |
| PDE4C | 2.046 | 19 | rs55887216 | G | C | G | 2.396 | 1.38E−02 |
| PDE4C | 2.015 | 19 | rs11670370 | A | G | A | 2.396 | 1.38E−02 |
| PDE4C | 2.015 | 19 | rs55887216 | G | C | G | 2.396 | 1.38E−02 |
| PDE4C | 1.993 | 19 | rs11670370 | A | G | A | 2.396 | 1.38E−02 |
| PDE4C | 1.993 | 19 | rs55887216 | G | C | G | 2.396 | 1.38E−02 |
| PDE4C | 1.908 | 19 | rs11670370 | A | G | A | 2.396 | 1.38E−02 |
| PDE4C | 1.908 | 19 | rs55887216 | G | C | G | 2.396 | 1.38E−02 |
| PDE4C | 1.892 | 19 | rs11670370 | A | G | A | 2.396 | 1.38E−02 |
| PDE4C | 1.892 | 19 | rs55887216 | G | C | G | 2.396 | 1.38E−02 |
| PCDH7 | −2.222 | 4 | rs9291547 | A | G | A | 2.511 | 1.40E−02 |
| ACKR2 | 2.64 | 3 | rs4396867 | A | G | A | 2.384 | 1.45E−02 |
| CTSH | −1.638 | 15 | rs7182836 | A | G | A | 4.546 | 1.47E−02 |
| APOB | −2.511 | 2 | rs531819 | A | C | A | 2.465 | 1.48E−02 |
| APOB | −2.514 | 2 | rs531819 | A | C | A | 2.465 | 1.48E−02 |
| APOB | −2.534 | 2 | rs531819 | A | C | A | 2.465 | 1.48E−02 |
| APOB | −2.555 | 2 | rs531819 | A | C | A | 2.465 | 1.48E−02 |
| APOB | −2.863 | 2 | rs531819 | A | C | A | 2.465 | 1.48E−02 |
| APOB | −2.882 | 2 | rs531819 | A | C | A | 2.465 | 1.48E−02 |
| APOB | −2.898 | 2 | rs531819 | A | C | A | 2.465 | 1.48E−02 |
| APOB | −2.923 | 2 | rs531819 | A | C | A | 2.465 | 1.48E−02 |
| APOB | −2.982 | 2 | rs531819 | A | C | A | 2.465 | 1.48E−02 |
| APOB | −3.014 | 2 | rs531819 | A | C | A | 2.465 | 1.48E−02 |
| TNXB | −1.643 | 6 | rs2269426 | A | G | G | 0.4419 | 1.50E−02 |
| PSMD5 | 1.81 | 9 | rs62581708 | C | A | A | 0.2814 | 1.52E−02 |
| CTU2 | 1.933 | 16 | rs3826076 | A | G | A | 3.703 | 1.55E−02 |
| POU5F1 | −1.53 | 6 | rs3130931 | A | G | A | 2.224 | 1.64E−02 |
| GLB1 | −2.833 | 3 | rs6781531 | A | G | A | 2.366 | 1.64E−02 |
| AFF3 | 3.218 | 2 | rs7423759 | G | A | G | 2.455 | 1.65E−02 |
| CTSH | −1.638 | 15 | rs3784539 | A | G | A | 2.856 | 1.68E−02 |
| CTSH | −1.638 | 15 | rs10400902 | A | G | A | 2.482 | 1.68E−02 |
| CTSH | −1.638 | 15 | rs11072817 | G | A | G | 2.428 | 1.70E−02 |
| CTSH | −1.638 | 15 | rs11072818 | A | G | A | 2.428 | 1.70E−02 |
| CTSH | −1.638 | 15 | rs1036937 | C | A | C | 2.428 | 1.70E−02 |
| GLB1 | −2.833 | 3 | rs28752078 | A | G | G | 0.4189 | 1.71E−02 |
| GLB1 | −2.833 | 3 | rs9310998 | A | C | A | 2.633 | 1.73E−02 |
| GLB1 | −2.833 | 3 | rs9310999 | A | C | A | 2.633 | 1.73E−02 |
| C5orf56 | −1.636 | 5 | rs6868372 | G | A | G | 2.211 | 1.76E−02 |
| C5orf56 | −2.192 | 5 | rs6868372 | G | A | G | 2.211 | 1.76E−02 |
| PCSK5 | −2.042 | 9 | rs7045212 | G | A | A | 0.2337 | 1.78E−02 |
| ANK3 | −1.906 | 10 | rs10994476 | G | A | G | 2.401 | 1.82E−02 |
| ANK3 | −2.062 | 10 | rs10994476 | G | A | G | 2.401 | 1.82E−02 |
| LSP1 | −2.084 | 11 | rs11041476 | A | G | A | 2.213 | 1.92E−02 |
| PDE4C | 2.673 | 19 | rs4808120 | A | G | A | 2.284 | 1.96E−02 |
| PDE4C | 2.673 | 19 | rs4808770 | A | G | A | 2.284 | 1.96E−02 |
| PDE4C | 2.259 | 19 | rs4808120 | A | G | A | 2.284 | 1.96E−02 |
| PDE4C | 2.259 | 19 | rs4808770 | A | G | A | 2.284 | 1.96E−02 |
| PDE4C | 2.223 | 19 | rs4808120 | A | G | A | 2.284 | 1.96E−02 |
| PDE4C | 2.223 | 19 | rs4808770 | A | G | A | 2.284 | 1.96E−02 |
| PDE4C | 2.146 | 19 | rs4808120 | A | G | A | 2.284 | 1.96E−02 |
| PDE4C | 2.146 | 19 | rs4808770 | A | G | A | 2.284 | 1.96E−02 |
| PDE4C | 2.128 | 19 | rs4808120 | A | G | A | 2.284 | 1.96E−02 |
| PDE4C | 2.128 | 19 | rs4808770 | A | G | A | 2.284 | 1.96E−02 |
| PDE4C | 2.107 | 19 | rs4808120 | A | G | A | 2.284 | 1.96E−02 |
| PDE4C | 2.107 | 19 | rs4808770 | A | G | A | 2.284 | 1.96E−02 |
| PDE4C | 2.046 | 19 | rs4808120 | A | G | A | 2.284 | 1.96E−02 |
| PDE4C | 2.046 | 19 | rs4808770 | A | G | A | 2.284 | 1.96E−02 |
| PDE4C | 2.015 | 19 | rs4808120 | A | G | A | 2.284 | 1.96E−02 |
| PDE4C | 2.015 | 19 | rs4808770 | A | G | A | 2.284 | 1.96E−02 |
| PDE4C | 1.993 | 19 | rs4808120 | A | G | A | 2.284 | 1.96E−02 |
| PDE4C | 1.993 | 19 | rs4808770 | A | G | A | 2.284 | 1.96E−02 |
| PDE4C | 1.908 | 19 | rs4808120 | A | G | A | 2.284 | 1.96E−02 |
| PDE4C | 1.908 | 19 | rs4808770 | A | G | A | 2.284 | 1.96E−02 |
| PDE4C | 1.892 | 19 | rs4808120 | A | G | A | 2.284 | 1.96E−02 |
| PDE4C | 1.892 | 19 | rs4808770 | A | G | A | 2.284 | 1.96E−02 |
| MIR210HG | −1.866 | 11 | rs7936401 | G | A | A | 0.4255 | 1.97E−02 |
| TRIM15 | −2.457 | 6 | rs1029239 | C | G | C | 2.122 | 1.98E−02 |
| TRIM15 | −2.457 | 6 | rs1029239 | C | G | C | 2.122 | 1.98E−02 |
| TNS1 | −1.848 | 2 | rs2288169 | C | G | G | 0.1703 | 2.05E−02 |
| TNS1 | −2.874 | 2 | rs2288169 | C | G | G | 0.1703 | 2.05E−02 |
| TRIM38 | −2.16 | 6 | rs17587597 | A | G | A | 3.446 | 2.07E−02 |
| PDE4C | 2.673 | 19 | rs62120395 | G | A | G | 2.271 | 2.10E−02 |
| PDE4C | 2.259 | 19 | rs62120395 | G | A | G | 2.271 | 2.10E−02 |
| PDE4C | 2.223 | 19 | rs62120395 | G | A | G | 2.271 | 2.10E−02 |
| PDE4C | 2.146 | 19 | rs62120395 | G | A | G | 2.271 | 2.10E−02 |
| PDE4C | 2.128 | 19 | rs62120395 | G | A | G | 2.271 | 2.10E−02 |
| PDE4C | 2.107 | 19 | rs62120395 | G | A | G | 2.271 | 2.10E−02 |
| PDE4C | 2.046 | 19 | rs62120395 | G | A | G | 2.271 | 2.10E−02 |
| PDE4C | 2.015 | 19 | rs62120395 | G | A | G | 2.271 | 2.10E−02 |
| PDE4C | 1.993 | 19 | rs62120395 | G | A | G | 2.271 | 2.10E−02 |
| PDE4C | 1.908 | 19 | rs62120395 | G | A | G | 2.271 | 2.10E−02 |
| PDE4C | 1.892 | 19 | rs62120395 | G | A | G | 2.271 | 2.10E−02 |
| ANK3 | −1.906 | 10 | rs10994441 | G | A | G | 2.841 | 2.11E−02 |
| ANK3 | −1.906 | 10 | rs10994442 | C | G | C | 2.841 | 2.11E−02 |
| ANK3 | −1.906 | 10 | rs10821814 | T | A | T | 2.841 | 2.11E−02 |
| ANK3 | −1.906 | 10 | rs10994465 | A | G | A | 2.841 | 2.11E−02 |
| ANK3 | −1.906 | 10 | rs12218617 | T | A | T | 2.841 | 2.11E−02 |
| ANK3 | −1.906 | 10 | rs10509138 | C | A | C | 2.841 | 2.11E−02 |
| ANK3 | −1.906 | 10 | rs61854518 | A | G | A | 2.841 | 2.11E−02 |
| ANK3 | −2.062 | 10 | rs10994441 | G | A | G | 2.841 | 2.11E−02 |
| ANK3 | −2.062 | 10 | rs10994442 | C | G | C | 2.841 | 2.11E−02 |
| ANK3 | −2.062 | 10 | rs10821814 | T | A | T | 2.841 | 2.11E−02 |
| ANK3 | −2.062 | 10 | rs10994465 | A | G | A | 2.841 | 2.11E−02 |
| ANK3 | −2.062 | 10 | rs12218617 | T | A | T | 2.841 | 2.11E−02 |
| ANK3 | −2.062 | 10 | rs10509138 | C | A | C | 2.841 | 2.11E−02 |
| ANK3 | −2.062 | 10 | rs61854518 | A | G | A | 2.841 | 2.11E−02 |
| CTSH | −1.638 | 15 | rs58119858 | A | G | A | 4.039 | 2.16E−02 |
| CTSH | −1.638 | 15 | rs2289700 | A | G | A | 4.039 | 2.16E−02 |
| CTSH | −1.638 | 15 | rs7496812 | G | A | G | 2.355 | 2.18E−02 |
| CTSH | −1.638 | 15 | rs2289699 | A | G | A | 2.355 | 2.18E−02 |
| OSBP | −2.137 | 11 | rs12289921 | A | C | A | 3.614 | 2.22E−02 |
| FBXL5 | −2.003 | 4 | rs10017222 | T | A | A | 0.4565 | 2.25E−02 |
| FBXL5 | −2.003 | 4 | rs10433813 | A | G | G | 0.4565 | 2.25E−02 |
| FBXL5 | −2.003 | 4 | rs6827406 | G | A | A | 0.4565 | 2.25E−02 |
| AFF3 | 3.218 | 2 | rs11123807 | G | A | G | 2.343 | 2.30E−02 |
| GATA4 | 2.909 | 8 | rs13273672 | G | A | G | 2.216 | 2.33E−02 |
| TRIM38 | −2.16 | 6 | rs17587226 | A | G | A | 3.685 | 2.37E−02 |
| AFF3 | 3.218 | 2 | rs1370355 | A | G | A | 2.317 | 2.38E−02 |
| ARHGEF10L | 2.853 | 1 | rs1408953 | G | A | G | 2.267 | 2.42E−02 |
| CTSH | −1.638 | 15 | rs10400877 | A | T | A | 2.296 | 2.45E−02 |
| CTSH | −1.638 | 15 | rs10400881 | C | G | C | 2.296 | 2.45E−02 |
| CTSH | −1.638 | 15 | rs11855406 | A | G | A | 2.296 | 2.45E−02 |
| CTSH | −1.638 | 15 | rs3825932 | A | G | A | 2.296 | 2.45E−02 |
| BCR | 2.54 | 22 | rs5751621 | A | G | A | 3.516 | 2.49E−02 |
| FER1L4 | −1.507 | 20 | rs1886695 | G | A | G | 2.393 | 2.52E−02 |
| CTSH | −1.638 | 15 | rs12148472 | G | A | G | 2.691 | 2.54E−02 |
| MIR210HG | −1.866 | 11 | rs7927267 | A | G | G | 0.4472 | 2.55E−02 |
| CYP4V2 | −2.02 | 4 | rs10013653 | A | C | A | 2.249 | 2.55E−02 |
| LEMD2 | −2.598 | 6 | rs2296748 | A | G | G | 0.4162 | 2.61E−02 |
| MPPED1 | 3.836 | 22 | rs6519378 | C | A | C | 2.751 | 2.62E−02 |
| FRMD4A | −1.861 | 10 | rs1000962 | G | A | G | 2.07 | 2.72E−02 |
| UBE2E3 | −2.544 | 2 | rs1949453 | A | T | A | 2.028 | 2.72E−02 |
| CFAP69 | 1.822 | 7 | rs10226014 | A | G | G | 0.4494 | 2.73E−02 |
| AP1G1 | −2.455 | 16 | rs11645475 | G | A | G | 3.251 | 2.74E−02 |
| OSBPL5 | −2.052 | 11 | rs4758538 | A | G | G | 0.3724 | 2.79E−02 |
| BRD2 | −5.369 | 6 | rs516535 | G | A | A | 0.4688 | 2.81E−02 |
| PRKCA | 1.976 | 17 | rs9896905 | A | G | A | 3.175 | 2.83E−02 |
| PRKCA | 1.931 | 17 | rs9896905 | A | G | A | 3.175 | 2.83E−02 |
| PRKCA | 1.92 | 17 | rs9896905 | A | G | A | 3.175 | 2.83E−02 |
| PRKCA | 1.886 | 17 | rs9896905 | A | G | A | 3.175 | 2.83E−02 |
| PRKCA | 1.867 | 17 | rs9896905 | A | G | A | 3.175 | 2.83E−02 |
| PRKCA | 1.865 | 17 | rs9896905 | A | G | A | 3.175 | 2.83E−02 |
| PRKCA | 1.859 | 17 | rs9896905 | A | G | A | 3.175 | 2.83E−02 |
| PRKCA | 1.851 | 17 | rs9896905 | A | G | A | 3.175 | 2.83E−02 |
| PRKCA | 1.766 | 17 | rs9896905 | A | G | A | 3.175 | 2.83E−02 |
| PRKCA | 1.754 | 17 | rs9896905 | A | G | A | 3.175 | 2.83E−02 |
| PRKCA | −2.506 | 17 | rs9896905 | A | G | A | 3.175 | 2.83E−02 |
| XPO1 | −2.383 | 2 | rs17009924 | G | A | G | 3.18 | 2.87E−02 |
| KIF21B | 1.983 | 1 | rs296564 | A | G | A | 2.291 | 2.89E−02 |
| MACROD2 | 2.336 | 20 | rs204609 | A | G | A | 3.762 | 2.90E−02 |
| CD209 | 2.135 | 19 | rs735239 | G | A | G | 2.022 | 2.93E−02 |
| MPZL3 | −2.879 | 11 | rs12419365 | A | C | C | 0.1044 | 2.93E−02 |
| CTSH | −1.638 | 15 | rs34593439 | A | G | A | 2.877 | 2.94E−02 |
| SLC17A4 | −2.641 | 6 | rs4712969 | A | G | A | 3.457 | 2.98E−02 |
| PIGT | −3.62 | 20 | rs2741585 | G | A | G | 2.304 | 2.99E−02 |
| PIGT | −3.62 | 20 | rs2251230 | A | G | A | 2.304 | 2.99E−02 |
| KIF21B | 1.983 | 1 | rs296569 | A | G | A | 2.396 | 3.04E−02 |
| KIF21B | 1.983 | 1 | rs296568 | A | C | A | 2.396 | 3.04E−02 |
| KIF21B | 1.983 | 1 | rs296567 | G | A | G | 2.396 | 3.04E−02 |
| KIF21B | 1.983 | 1 | rs296561 | G | C | G | 2.396 | 3.04E−02 |
| MRVI1 | −1.588 | 11 | rs11042902 | A | G | A | 2.044 | 3.05E−02 |
| HNF1A | 4.423 | 12 | rs1169302 | C | A | C | 2.227 | 3.07E−02 |
| POU5F1 | −1.53 | 6 | rs3130503 | A | G | A | 2.601 | 3.08E−02 |
| ALPL | 2.754 | 1 | rs869179 | A | G | A | 2.001 | 3.11E−02 |
| PTPN11 | −1.575 | 12 | rs2301756 | G | A | G | 3.38 | 3.11E−02 |
| RPL6 | −1.995 | 12 | rs2301723 | A | G | A | 3.38 | 3.11E−02 |
| PAK2 | −2.675 | 3 | rs6583176 | A | G | A | 2.054 | 3.12E−02 |
| HNF1A | 4.423 | 12 | rs1169303 | A | C | C | 0.4555 | 3.14E−02 |
| MACROD2 | 2.336 | 20 | rs1890564 | A | G | A | 2.931 | 3.18E−02 |
| SLC17A4 | −2.641 | 6 | rs6910549 | A | G | A | 2.742 | 3.21E−02 |
| ANK3 | −1.906 | 10 | rs10821699 | A | G | G | 0.4789 | 3.24E−02 |
| ANK3 | −2.062 | 10 | rs10821699 | A | G | G | 0.4789 | 3.24E−02 |
| SAR1B | −1.58 | 5 | rs11948613 | G | A | G | 2.624 | 3.25E−02 |
| SAR1B | −2.72 | 5 | rs11948613 | G | A | G | 2.624 | 3.25E−02 |
| TCF7 | −1.54 | 5 | rs6876997 | G | A | G | 3.137 | 3.26E−02 |
| TCF7 | −1.544 | 5 | rs6876997 | G | A | G | 3.137 | 3.26E−02 |
| TCF7 | −1.552 | 5 | rs6876997 | G | A | G | 3.137 | 3.26E−02 |
| TCF7 | −1.559 | 5 | rs6876997 | G | A | G | 3.137 | 3.26E−02 |
| TCF7 | −1.572 | 5 | rs6876997 | G | A | G | 3.137 | 3.26E−02 |
| TCF7 | −1.58 | 5 | rs6876997 | G | A | G | 3.137 | 3.26E−02 |
| TCF7 | −1.6 | 5 | rs6876997 | G | A | G | 3.137 | 3.26E−02 |
| TCF7 | −1.612 | 5 | rs6876997 | G | A | G | 3.137 | 3.26E−02 |
| TCF7 | −1.613 | 5 | rs6876997 | G | A | G | 3.137 | 3.26E−02 |
| PPP2CA | −2.033 | 5 | rs7704116 | A | G | A | 3.137 | 3.26E−02 |
| DDC | −3.01 | 7 | rs3807563 | A | G | G | 0.4565 | 3.26E−02 |
| C3orf20 | 2.403 | 3 | rs11128719 | A | G | G | 0.4002 | 3.34E−02 |
| HLA-DQA2 | 1.541 | 6 | rs9276427 | A | G | A | 1.999 | 3.36E−02 |
| HLA-DQA2 | −1.56 | 6 | rs9276427 | A | G | A | 1.999 | 3.36E−02 |
| ANK3 | −1.906 | 10 | rs7919274 | G | A | G | 2.571 | 3.38E−02 |
| ANK3 | −2.062 | 10 | rs7919274 | G | A | G | 2.571 | 3.38E−02 |
| RPL30 | −1.895 | 8 | rs2877453 | A | C | C | 0.4584 | 3.43E−02 |
| RPL30 | −1.936 | 8 | rs2877453 | A | C | C | 0.4584 | 3.43E−02 |
| APOB | −2.511 | 2 | rs1041968 | A | G | G | 0.459 | 3.43E−02 |
| APOB | −2.514 | 2 | rs1041968 | A | G | G | 0.459 | 3.43E−02 |
| APOB | −2.534 | 2 | rs1041968 | A | G | G | 0.459 | 3.43E−02 |
| APOB | −2.555 | 2 | rs1041968 | A | G | G | 0.459 | 3.43E−02 |
| APOB | −2.863 | 2 | rs1041968 | A | G | G | 0.459 | 3.43E−02 |
| APOB | −2.882 | 2 | rs1041968 | A | G | G | 0.459 | 3.43E−02 |
| APOB | −2.898 | 2 | rs1041968 | A | G | G | 0.459 | 3.43E−02 |
| APOB | −2.923 | 2 | rs1041968 | A | G | G | 0.459 | 3.43E−02 |
| APOB | −2.982 | 2 | rs1041968 | A | G | G | 0.459 | 3.43E−02 |
| APOB | −3.014 | 2 | rs1041968 | A | G | G | 0.459 | 3.43E−02 |
| DDC | −3.01 | 7 | rs2329340 | A | G | A | 1.984 | 3.50E−02 |
| DDC | −3.01 | 7 | rs2329341 | C | A | C | 1.984 | 3.50E−02 |
| DDC | −3.01 | 7 | rs10247443 | A | G | A | 1.984 | 3.50E−02 |
| DDC | −3.01 | 7 | rs10250513 | C | A | C | 1.984 | 3.50E−02 |
| DDC | −3.01 | 7 | rs6949897 | A | G | A | 1.984 | 3.50E−02 |
| DDC | −3.01 | 7 | rs1451373 | G | A | G | 1.984 | 3.50E−02 |
| DDC | −3.01 | 7 | rs1451374 | A | G | A | 1.984 | 3.50E−02 |
| DDC | −3.01 | 7 | rs1451375 | A | C | A | 1.984 | 3.50E−02 |
| DDC | −3.01 | 7 | rs921451 | G | A | G | 1.984 | 3.50E−02 |
| DDC | −3.01 | 7 | rs2329342 | A | G | A | 1.984 | 3.50E−02 |
| DDC | −3.01 | 7 | rs4452748 | A | C | A | 1.984 | 3.50E−02 |
| DDC | −3.01 | 7 | rs1966839 | G | A | G | 1.984 | 3.50E−02 |
| HLA-DMB | −1.711 | 6 | rs151719 | G | A | G | 2.358 | 3.50E−02 |
| HLA-DMB | −1.812 | 6 | rs151719 | G | A | G | 2.358 | 3.50E−02 |
| ANK3 | −1.906 | 10 | rs10761552 | A | C | A | 2.22 | 3.51E−02 |
| ANK3 | −2.062 | 10 | rs10761552 | A | C | A | 2.22 | 3.51E−02 |
| CLCN6 | −2.964 | 1 | rs17037425 | A | G | G | 0.2621 | 3.52E−02 |
| ANK3 | −1.906 | 10 | rs2893861 | | G | A | 2.205 | 3.55E−02 |
| ANK3 | −1.906 | 10 | rs1993939 | C | A | C | 2.205 | 3.55E−02 |
| ANK3 | −1.906 | 10 | rs10821833 | G | C | G | 2.205 | 3.55E−02 |
| ANK3 | −1.906 | 10 | rs1904418 | G | A | G | 2.205 | 3.55E−02 |
| ANK3 | −2.062 | 10 | rs2893861 | A | G | A | 2.205 | 3.55E−02 |
| ANK3 | −2.062 | 10 | rs1993939 | C | A | C | 2.205 | 3.55E−02 |
| ANK3 | −2.062 | 10 | rs10821833 | G | C | G | 2.205 | 3.55E−02 |
| ANK3 | −2.062 | 10 | rs1904418 | G | A | G | 2.205 | 3.55E−02 |
| SNAP47 | 2.803 | 1 | rs7533588 | A | G | G | 0.4483 | 3.56E−02 |
| LRRC56 | −1.987 | 11 | rs12277611 | A | G | G | 0.4553 | 3.56E−02 |
| LZTFL1 | 2.29 | 3 | rs34068335 | A | G | A | 2.572 | 3.56E−02 |
| DDC | −3.01 | 7 | rs11238134 | A | C | A | 2.038 | 3.56E−02 |
| XCR1 | 3.186 | 3 | rs36040135 | G | A | G | 2.563 | 3.57E−02 |
| XCR1 | 3.186 | 3 | rs13074382 | G | A | G | 2.563 | 3.57E−02 |
| XCR1 | 3.186 | 3 | rs13097556 | G | A | G | 2.563 | 3.57E−02 |
| XCR1 | 3.186 | 3 | rs2230322 | G | A | G | 2.563 | 3.57E−02 |
| XCR1 | 3.186 | 3 | rs71327010 | A | C | A | 2.563 | 3.57E−02 |
| TRIM15 | −2.457 | 6 | rs1008403 | G | A | G | 2.513 | 3.59E−02 |
| TRIM15 | −2.457 | 6 | rs9368624 | A | G | A | 2.513 | 3.59E−02 |
| TRIM15 | −2.457 | 6 | rs1008403 | G | A | G | 2.513 | 3.59E−02 |
| TRIM15 | −2.457 | 6 | rs9368624 | A | G | A | 2.513 | 3.59E−02 |
| CTSH | −1.638 | 15 | rs16970287 | G | A | G | 3.966 | 3.59E−02 |
| CTSH | −1.638 | 15 | rs8034542 | G | A | G | 3.966 | 3.59E−02 |
| XPO1 | −2.383 | 2 | rs1050567 | A | G | A | 2.595 | 3.60E−02 |
| APOB | −2.511 | 2 | rs693 | A | G | G | 0.4602 | 3.61E−02 |
| APOB | −2.514 | 2 | rs693 | A | G | G | 0.4602 | 3.61E−02 |
| APOB | −2.534 | 2 | rs693 | A | G | G | 0.4602 | 3.61E−02 |
| APOB | −2.555 | 2 | rs693 | A | G | G | 0.4602 | 3.61E−02 |
| APOB | −2.863 | 2 | rs693 | A | G | G | 0.4602 | 3.61E−02 |
| APOB | −2.882 | 2 | rs693 | A | G | G | 0.4602 | 3.61E−02 |
| APOB | −2.898 | 2 | rs693 | A | G | G | 0.4602 | 3.61E−02 |
| APOB | −2.923 | 2 | rs693 | A | G | G | 0.4602 | 3.61E−02 |
| APOB | −2.982 | 2 | rs693 | A | G | G | 0.4602 | 3.61E−02 |
| APOB | −3.014 | 2 | rs693 | A | G | G | 0.4602 | 3.61E−02 |
| KIF21B | 1.983 | 1 | rs72749142 | A | G | G | 0.2179 | 3.61E−02 |
| AVIL | −2.063 | 12 | rs12582311 | G | A | G | 2.179 | 3.61E−02 |
| HLA-DMA | −1.596 | 6 | rs6899309 | G | A | G | 3.951 | 3.66E−02 |
| HLA-DMA | −2.28 | 6 | rs6899309 | G | A | G | 3.951 | 3.66E−02 |
| DDC | −3.01 | 7 | rs1470750 | G | C | C | 0.4737 | 3.69E−02 |
| AGAP2 | −1.67 | 12 | rs12368653 | G | A | G | 2.041 | 3.69E−02 |
| IGFBP7 | −2.231 | 4 | rs11573051 | A | G | A | 2.344 | 3.77E−02 |
| RPL18 | −1.79 | 19 | rs369880 | A | G | A | 2.348 | 3.79E−02 |
| PDE4C | 2.673 | 19 | rs57884093 | A | G | G | 0.4433 | 3.88E−02 |
| PDE4C | 2.259 | 19 | rs57884093 | A | G | G | 0.4433 | 3.88E−02 |
| PDE4C | 2.223 | 19 | rs57884093 | A | G | G | 0.4433 | 3.88E−02 |
| PDE4C | 2.146 | 19 | rs57884093 | A | G | G | 0.4433 | 3.88E−02 |
| PDE4C | 2.128 | 19 | rs57884093 | A | G | G | 0.4433 | 3.88E−02 |
| PDE4C | 2.107 | 19 | rs57884093 | A | G | G | 0.4433 | 3.88E−02 |
| PDE4C | 2.046 | 19 | rs57884093 | A | G | G | 0.4433 | 3.88E−02 |
| PDE4C | 2.015 | 19 | rs57884093 | A | G | G | 0.4433 | 3.88E−02 |
| PDE4C | 1.993 | 19 | rs57884093 | A | G | G | 0.4433 | 3.88E−02 |
| PDE4C | 1.908 | 19 | rs57884093 | A | G | G | 0.4433 | 3.88E−02 |
| PDE4C | 1.892 | 19 | rs57884093 | A | G | G | 0.4433 | 3.88E−02 |
| DGKD | −2.251 | 2 | rs60137910 | G | A | A | 0.3211 | 3.93E−02 |
| MACROD2 | 2.336 | 20 | rs1998105 | A | G | G | 0.4126 | 3.97E−02 |
| AFF3 | 3.218 | 2 | rs1814009 | A | G | G | 0.3738 | 4.14E−02 |
| APOB | −2.511 | 2 | rs512535 | A | G | A | 1.984 | 4.22E−02 |
| APOB | −2.514 | 2 | rs512535 | A | G | A | 1.984 | 4.22E−02 |
| APOB | −2.534 | 2 | rs512535 | A | G | A | 1.984 | 4.22E−02 |
| APOB | −2.555 | 2 | rs512535 | A | G | A | 1.984 | 4.22E−02 |
| APOB | −2.863 | 2 | rs512535 | A | G | A | 1.984 | 4.22E−02 |
| APOB | −2.882 | 2 | rs512535 | A | G | A | 1.984 | 4.22E−02 |
| APOB | −2.898 | 2 | rs512535 | A | G | A | 1.984 | 4.22E−02 |
| APOB | −2.923 | 2 | rs512535 | A | G | A | 1.984 | 4.22E−02 |
| APOB | −2.982 | 2 | rs512535 | A | G | A | 1.984 | 4.22E−02 |
| APOB | −3.014 | 2 | rs512535 | A | G | A | 1.984 | 4.22E−02 |
| MIR210HG | −1.866 | 11 | rs3740651 | G | A | A | 0.4255 | 4.27E−02 |
| SMARCA4 | −2.783 | 19 | rs1122608 | A | C | C | 0.3678 | 4.35E−02 |
| SMARCA4 | −2.783 | 19 | rs12052058 | A | C | C | 0.3678 | 4.35E−02 |
| DLC1 | −1.868 | 8 | rs11998187 | G | A | A | 0.3688 | 4.40E−02 |
| PIP5K1C | 2.257 | 19 | rs12984273 | G | A | A | 0.4936 | 4.42E−02 |
| PIP5K1C | −1.825 | 19 | rs12984273 | G | A | A | 0.4936 | 4.42E−02 |
| APOB | −2.511 | 2 | rs550619 | G | A | G | 2.183 | 4.44E−02 |
| APOB | −2.511 | 2 | rs570877 | A | C | A | 2.183 | 4.44E−02 |
| APOB | −2.514 | 2 | rs550619 | G | A | G | 2.183 | 4.44E−02 |
| APOB | −2.514 | 2 | rs570877 | A | C | A | 2.183 | 4.44E−02 |
| APOB | −2.534 | 2 | rs550619 | G | A | G | 2.183 | 4.44E−02 |
| APOB | −2.534 | 2 | rs570877 | A | C | A | 2.183 | 4.44E−02 |
| APOB | −2.555 | 2 | rs550619 | G | A | G | 2.183 | 4.44E−02 |
| APOB | −2.555 | 2 | rs570877 | A | C | A | 2.183 | 4.44E−02 |
| APOB | −2.863 | 2 | rs550619 | G | A | G | 2.183 | 4.44E−02 |
| APOB | −2.863 | 2 | rs570877 | A | C | A | 2.183 | 4.44E−02 |
| APOB | −2.882 | 2 | rs550619 | G | A | G | 2.183 | 4.44E−02 |
| APOB | −2.882 | 2 | rs570877 | A | C | A | 2.183 | 4.44E−02 |
| APOB | −2.898 | 2 | rs550619 | G | A | G | 2.183 | 4.44E−02 |
| APOB | −2.898 | 2 | rs570877 | A | C | A | 2.183 | 4.44E−02 |
| APOB | −2.923 | 2 | rs550619 | G | A | G | 2.183 | 4.44E−02 |
| APOB | −2.923 | 2 | rs570877 | A | C | A | 2.183 | 4.44E−02 |
| APOB | −2.982 | 2 | rs550619 | G | A | G | 2.183 | 4.44E−02 |
| APOB | −2.982 | 2 | rs570877 | A | C | A | 2.183 | 4.44E−02 |
| APOB | −3.014 | 2 | rs550619 | G | A | G | 2.183 | 4.44E−02 |
| APOB | −3.014 | 2 | rs570877 | A | C | A | 2.183 | 4.44E−02 |
| PTPN11 | −1.575 | 12 | rs7958372 | A | G | A | 3.097 | 4.46E−02 |
| HNF4A | 2.051 | 20 | rs6130615 | A | G | G | 0.2157 | 4.48E−02 |
| DNMT3A | 2.471 | 2 | rs58552784 | C | G | G | 0.3441 | 4.49E−02 |
| MIR210HG | −1.866 | 11 | rs1062099 | C | G | G | 0.3488 | 4.49E−02 |
| ALDH2 | −2.899 | 12 | rs7296651 | C | G | C | 2.369 | 4.52E−02 |
| UQCR10 | −2.73 | 22 | rs16988025 | A | G | A | 3.007 | 4.59E−02 |
| LZTFL1 | 2.29 | 3 | rs12493471 | A | G | A | 1.868 | 4.59E−02 |
| MIR210HG | −1.866 | 11 | rs12792868 | T | A | A | 0.4276 | 4.63E−02 |
| DDC | −3.01 | 7 | rs2329365 | G | A | G | 1.956 | 4.64E−02 |
| DDC | −3.01 | 7 | rs12718527 | A | G | A | 1.956 | 4.64E−02 |
| DDC | −3.01 | 7 | rs11238138 | G | A | G | 1.956 | 4.64E−02 |
| DDC | −3.01 | 7 | rs4579483 | G | A | G | 1.956 | 4.64E−02 |
| DDC | −3.01 | 7 | rs4580999 | G | A | G | 1.956 | 4.64E−02 |
| DDC | −3.01 | 7 | rs4436083 | G | A | G | 1.956 | 4.64E−02 |
| SAR1B | −1.58 | 5 | rs2305049 | A | C | A | 2.421 | 4.65E−02 |
| SAR1B | −2.72 | 5 | rs2305049 | A | C | A | 2.421 | 4.65E−02 |
| CHRM3 | 2.562 | 1 | rs685548 | A | C | C | 0.4816 | 4.73E−02 |
| HNF1A | 4.423 | 12 | rs2244608 | G | A | G | 2.114 | 4.77E−02 |
| CDK13 | 2.087 | 7 | rs773386 | G | A | A | 0.5228 | 4.79E−02 |
| DDC | −3.01 | 7 | rs6593010 | G | A | G | 1.897 | 4.79E−02 |
| DDC | −3.01 | 7 | rs10278338 | A | G | A | 1.897 | 4.79E−02 |
| DDC | −3.01 | 7 | rs56233242 | A | C | A | 1.929 | 4.81E−02 |
| MACROD2 | 2.336 | 20 | rs1225888 | G | A | G | 1.953 | 4.84E−02 |
| RASSF7 | −2.144 | 11 | rs11246189 | A | G | G | 0.3533 | 4.84E−02 |
| CEP85L | −1.803 | 6 | rs17348534 | A | G | G | 0.4018 | 4.85E−02 |
| ANK3 | −1.906 | 10 | rs16915196 | G | A | G | 2.257 | 4.88E−02 |
| ANK3 | −1.906 | 10 | rs61853514 | A | C | A | 2.257 | 4.88E−02 |
| ANK3 | −1.906 | 10 | rs10994430 | A | C | A | 2.257 | 4.88E−02 |
| ANK3 | −1.906 | 10 | rs16915231 | A | G | A | 2.257 | 4.88E−02 |
| ANK3 | −1.906 | 10 | rs2028564 | G | A | G | 2.257 | 4.88E−02 |
| ANK3 | −2.062 | 10 | rs16915196 | G | A | G | 2.257 | 4.88E−02 |
| ANK3 | −2.062 | 10 | rs61853514 | A | C | A | 2.257 | 4.88E−02 |
| ANK3 | −2.062 | 10 | rs10994430 | A | C | A | 2.257 | 4.88E−02 |
| ANK3 | −2.062 | 10 | rs16915231 | A | G | A | 2.257 | 4.88E−02 |
| ANK3 | −2.062 | 10 | rs2028564 | G | A | G | 2.257 | 4.88E−02 |
| APOB | −2.511 | 2 | rs12713956 | G | A | G | 2.14 | 4.89E−02 |
| APOB | −2.514 | 2 | rs12713956 | G | A | G | 2.14 | 4.89E−02 |
| APOB | −2.534 | 2 | rs12713956 | G | A | G | 2.14 | 4.89E−02 |
| APOB | −2.555 | 2 | rs12713956 | G | A | G | 2.14 | 4.89E−02 |
| APOB | −2.863 | 2 | rs12713956 | G | A | G | 2.14 | 4.89E−02 |
| APOB | −2.882 | 2 | rs12713956 | G | A | G | 2.14 | 4.89E−02 |
| APOB | −2.898 | 2 | rs12713956 | G | A | G | 2.14 | 4.89E−02 |
| APOB | −2.923 | 2 | rs12713956 | G | A | G | 2.14 | 4.89E−02 |
| APOB | −2.982 | 2 | rs12713956 | G | A | G | 2.14 | 4.89E−02 |
| APOB | −3.014 | 2 | rs12713956 | G | A | G | 2.14 | 4.89E−02 |
| RORA | −1.764 | 15 | rs922778 | G | A | G | 2.171 | 4.91E−02 |
| PCSK5 | −2.042 | 9 | rs1006280 | G | A | A | 0.4936 | 4.92E−02 |

[0056] One polymorphism from Table 1 or Table 2, or any combination of polymorphisms from Table 1 or Table 2, may be detected in a sample obtained from the subject for purposes of characterizing and/or treating an inflammatory disease using the methods disclosed herein. In some embodiments, two copies of the polymorphism are detected in the sample obtained from the subject. A subject carrying one copy of the polymorphism has a heterozygous risk genotype. In some embodiments, one copy of the polymorphism is detected in the sample obtained from the subject. A subject carrying two copies of the polymorphism has a homozygous risk genotype. The method of obtaining the sample may include acquisition of the sample from the subject directly, or indirectly. In some embodiments provided are methods of assaying to detect in the sample a presence of a polymorphism located at the gene locus.

[0057] In some cases, the genotype is indicative of a downregulation of PTPN11, which is predictive of a risk of developing a severe form of CD characteristic of CD3. In some cases, the genotype comprise is rs2301756G, which is provided in SEQ ID NO: 339. In some cases, the genotype is rs7958372A, which is provided in SEQ ID NO: 408.

[0058] In some cases, the genotype is indicative of a downregulation of RPL30, which is predictive of a risk of developing a severe form of CD characteristic of CD3. In some cases, the genotype is rs2877453C, which is provided in SEQ ID NO: 353.

[0059] In some cases, the genotype is indicative of an upregulation of XCR1, which is predictive of a risk of developing a severe form of CD characteristic of CD3. In some cases, the genotype is rs36040135G, which is provided in SEQ ID NO: 378. In some cases, the genotype is rs13074382G, which is provided in SEQ ID NO: 379. In some cases, the genotype is rs13097556G, which is provided in SEQ ID NO: 380. In some cases, the genotype is rs2230322G, which is provided in SEQ ID NO: 381. In some cases, the genotype is rs71327010A, which is provided in SE ID NO: 382.

[0060] In some cases, the genotype is indicative of an upregulation of HNF1A, which is predictive of a risk of developing a severe form of CD characteristic of CD3. In some cases, the genotype is rs2244608G, which is provided in SEQ ID NO: 424. In some cases, the genotype is rs1169302C, which is provided in SEQ ID NO: 336. In some cases, the genotype is rs1169303G, which is provided in SEQ ID NO: 337.

[0061] In some cases, the genotype is indicative of a downregulation of RPL3, which is predictive of a risk of developing a severe form of CD characteristic of CD3. In some cases, the genotype is rs6519183A, which is provided in SEQ ID NO: 174.

[0062] In some cases, the genotype is indicative of a upregulation of CHRM3, which is predictive of a risk of developing a severe form of CD characteristic of CD3. In some cases, the genotype is rs685548C, which is provided in SEQ ID NO: 423.

[0063] In some cases, the genotype is indicative of a downregulation of DLC1, which is predictive of a risk of developing a severe form of CD characteristic of CD3. In some cases, the genotype is rs11998187A, which is provided in SEQ ID NO: 404.

[0064] In some cases, the genotype is indicative of a downregulation of APOB, which is predictive of a risk of developing a severe form of CD characteristic of CD3. In some cases, the genotype is rs531819A, which is provided in SEQ ID NO: 258. In some cases, the genotype is rs1041968G, which is provided in SEQ ID NO: 354. In some cases, the genotype is rs693G, which is provided in SEQ ID NO: 388. In some cases, the genotype is rs512535A, which is provided in SEQ ID NO: 400. In some cases, the genotype is rs550619G which is provided in SEQ ID NO: 406. In some cases, the genotype is rs570877A, which is provided in SEQ ID NO: 407. In some cases, the genotype is rs12713956G, which is provided in SEQ ID NO: 437.

[0065] In some cases, the genotype is indicative of a downregulation of RPL6, which is predictive of a risk of developing a severe form of CD characteristic of CD3. In some cases, the genotype is rs2301723A, which is provided in SEQ ID NO: 340.

[0066] In some cases, the genotype is indicative of an upregulation of GRM4, which is predictive of a risk of developing a severe form of CD characteristic of CD3. In some cases, the genotype is rs2499714A, which is provided in SEQ ID NO: 181.

[0067] In some cases, the genotype is indicative of a downregulation of PAK2, which is predictive of a risk of developing a severe form of CD characteristic of CD3. In some cases, the genotype is rs6583176A, which is provided in SEQ ID NO: 341.

[0068] In some cases, the genotype is indicative of a downregulation of RPL18, which is predictive of a risk of developing a severe form of CD characteristic of CD3. In some cases, the genotype is rs369880A, which is provided in SEQ ID NO: 395.

[0069] In some cases, the genotype is indicative of an upregulation of PDE4C, which is predictive of a risk of developing a severe form of CD characteristic of CD3. In some cases, the genotype is rs57884093G, which is provided in SEQ ID NO: 396.

[0070] In some cases, the genotype is indicative of an upregulation or downregulation of PRKCA, which is predictive of a risk of developing a severe form of CD characteristic of CD3. In some cases, the genotype is rs9896905A, which is provided in SEQ ID NO: 321.

[0071] In some cases, the genotype is indicative of a downregulation of PPP2CA, which is predictive of a risk of developing a severe form of CD characteristic of CD3. In some cases, the genotype is rs7704116A, which is provided in SEQ ID NO: 348.

[0072] In some cases, the genotype is indicative of a downregulation of RIP5K1C, which is predictive of a risk of developing a severe form of CD characteristic of CD3. In some cases, the genotype is rs12984273A, which is provided in SEQ ID NO: 405.

[0073] In some cases, the genotype is indicative of an upregulation of HIST1H1A, which is predictive of a risk of developing a severe form of CD characteristic of CD3. In some cases, the genotype is rs16891235G, which is provided in SEQ ID NO: 236.

[0074] In some cases, the genotype is indicative of a downregulation of BRD2, which is predictive of a risk of developing a severe form of CD characteristic of CD3. In some cases, the genotype is rs516535A, which is provided in SEQ ID NO: 320.

[0075] In some cases, the genotype is indicative of an upregulation or a downregulation of HLA-DQA2, which is predictive of a risk of developing a severe form of CD characteristic of CD3. In some cases, the genotype is rs9276427A, which is provided in SEQ ID NO: 351.

[0076] In some cases, the genotype is indicative of an upregulation of KIF21B, which is predictive of a risk of developing a severe form of CD characteristic of CD3. In some cases, the genotype is rs296564A, rs296569A, which is provided in SEQ ID NO: 331. In some cases, the genotype is rs296568A, which is provided in SEQ ID NO: 332. In some cases, the genotype is rs296567G, which is provided in SEQ ID NO: 333. In some cases, the genotype is rs296561G, which is provided in SEQ ID NO: 334. In some cases, the genotype is rs72749142G, which is provided in SEQ ID NO: 389.

[0077] In some cases, the genotype is indicative of a downregulation of PCDH7, which is predictive of a risk of developing a severe form of CD characteristic of CD3. In some cases, the genotype is rs9291547A, which is provided in SEQ ID NO: 255.

[0078] In some cases, the genotype is indicative of a downregulation of ANK3, which is predictive of a risk of developing a severe form of CD characteristic of CD3. In some cases, the genotype is rs10761532A, which is provided in SEQ ID NO: 194. In some cases, the genotype is rs10821813A, which is provided in SEQ ID NO: 195. In some cases, the genotype is rs1561852C, which is provided in SEQ ID NO: 196. In some cases, the genotype is rs10994464A, which is provided in SEQ ID NO: 204. In some cases, the genotype is rs993402Q which is provided in SEQ ID NO: 205. In some cases, the genotype is rs10994467A, which is provided in SEQ ID NO: 206. In some cases, the genotype is rs10821822A, which is provided in SEQ ID NO: 207. In some cases, the genotype is rs1837949G, which is provided in SEQ ID NO: 208. In some cases, the genotype is rs35597961C, which is provided in SEQ ID NO: 209. In some cases, the genotype is rs10821830G, which is provided in SEQ ID NO: 210. In some cases, the genotype is rs975262A, which is provided in SEQ ID NO: 211. In some cases, the genotype is rs973067A, which is provided in SEQ ID NO: 212. In some cases, the genotype is rs10509139G, which is provided in SEQ ID NO: 213. In some cases, the genotype is rs1442539A, which is provided in SEQ ID NO: 214. In some cases, the genotype is rs2197155A, which is provided in SEQ ID NO: 215. In some cases, the genotype is rs7919914G, which is provided in SEQ ID NO: 216. In some cases, the genotype is rs10994476G, which is provided in SEQ ID NO: 275. In some cases, the genotype is rs35471473A, which is provided in SEQ ID NO: 243. In some cases, the genotype is rs12785023Q which is provided in SEQ ID NO: 244. In some cases, the genotype is rs12783716G, which is provided in SEQ ID NO: 245. In some cases, the genotype is rs10821821G, which is provided in SEQ ID NO: 246. In some cases, the genotype is rs10994441G, which is provided in SEQ ID NO: 284. In some cases, the genotype is rs10994442C, which is provided in SEQ ID NO: 285. In some cases, the genotype is rs10821814T, which is provided in SEQ ID NO: 286. In some cases, the genotype is rs10994465A, which is provided in SEQ ID NO: 287. In some cases, the genotype is rs12218617T, which is provided in SEQ ID NO: 288. In some cases, the genotype is rs10509138C, which is provided in SEQ ID NO: 289. In some cases, the genotype is rs61854518A, which is provided in SEQ ID NO: 290. In some cases, the genotype is rs10821699G, which is provided in SEQ ID NO: 345. In some cases, the genotype is rs7919274G, which is provided in SEQ ID NO: 352. In some cases, the genotype is rs10761552A, which is provided in SEQ ID NO: 368. In some cases, the genotype is rs17037425G, which is provided in SEQ ID NO: 369. In some cases, the genotype is rs2893861A, which is provided in SEQ ID NO: 370. In some cases, the genotype is rs1993939C, which is provided in SEQ ID NO: 371. In some cases, the genotype is rs10821833G, which is provided in SEQ ID NO: 372. In some cases, the genotype is rs1904418G, which is provided in SEQ ID NO: 373. In some cases, the genotype is rs16915196G, which is provided in SEQ ID NO: 432. In some cases, the genotype is rs61853514A, which is provided in SEQ ID NO: 433. In some cases, the genotype is rs10994430A, which is provided in SEQ ID NO: 434. In some cases, the genotype is rs16915231A, which is provided in SEQ ID NO: 435. In some cases, the genotype is rs2028564G, which is provided in SEQ ID NO: 436.

[0079] In some cases, the genotype is indicative of a downregulation of TRIM38, which is predictive of a risk of developing a severe form of CD characteristic of CD3. In some cases, the genotype is rs13196552G, which is provided in SEQ ID NO: 237. In some cases, the genotype is rs17587597A, which is provided in SEQ ID NO: 282. In some cases, the genotype is rs17587226A, which is provided in SEQ ID NO: 301.

[0080] In some cases, the genotype is indicative of a downregulation of CYP4V2, which is predictive of a risk of developing a severe form of CD characteristic of CD3. In some cases, the genotype is rs2276917A, which is provided in SEQ ID NO: 200. In some cases, the genotype is rs10013653A, which is provided in SEQ ID NO: 312.

[0081] In some cases, the genotype is indicative of a downregulation of VAMP3, which is predictive of a risk of developing a severe form of CD characteristic of CD3. In some cases, the genotype is rs11582799A, which is provided in SEQ ID NO: 222. In some cases, the genotype is rs111692854A, which is provided in SEQ ID NO: 223. In some cases, the genotype is rs72632053A, which is provided in SEQ ID NO: 224.

[0082] In some embodiments, the risk genotype is associated with a clinical subgroup of patients with the inflammatory disease or subclinical phenotype. A subclinical phenotype may include specific diagnosable diseases or conditions, in addition to disease progression that is characteristic of severe or unusual forms of inflammatory disease. Non-limiting examples of inflammatory disease subclinical phenotypes include, but are not limited to, non-stricturing, stricturing, stricturing and penetrating, and isolated internal penetrating disease, and perianal Crohn's disease (pCD). Stricturing is the progressive narrowing of the intestine. Internal penetrating disease creates abnormal passageways (fistulae) between the bowel and other structures. pCD is a form of Crohn's disease that causes inflammation around the anus. Further, patients with disease that is stricturing, penetrating and stricturing, or isolated internal penetrating, and patients with pCD are more likely to require surgery in a shorter timespan than a patient who has an inflammatory disease, such as IBD, but who does not exhibit these subclinical phenotypes. In some embodiments, the polymorphism is associated with a time to first surgery, or a time to second surgery (defined as time between first surgery and either of a second surgery or last follow-up), or a combination thereof. The time to first surgery may be from about 2 to 8 years. The time to first surgery may be from about 4 to 10 years. The time to first surgery may be from about 6 to 12 years. The time to first surgery may be from about 8 to 14 years. The time to first surgery may be from about 10 to 16 years. The time to second surgery may be about 2-10 months. The time to second surgery may be about 20 to 120 months. The time to second surgery may be about 30 to 140 months. The time to second surgery may be about 50 to 160 months. The time to second surgery may be about 70 to 180 months. Subclinical phenotypes of IBD may manifest in specific disease locations. Non-limiting examples of disease location include the ileum, colon, region spanning the ileum and colon (ilealcolonic region), and small bowel. In some embodiments, the risk genotype is associated with stricturing disease in the ileum, colon, ilealcolonic region, or small bowel. In some embodiments, the risk genotype is associated with stricturing and penetrating disease in the ileum, colon, ilealcolonic region, or small bowel. In some embodiments, the risk genotype is associated with isolated penetrating disease in the ileum, colon, ilealcolonic region, or small bowel. Subclinical phenotypes of inflammatory disease may also include non-response to current inflammatory disease therapies. In some embodiments, the risk genotype is associated with non-response to anti-TNF-alpha therapy, anti-a4-b7 therapy (vedolizumab), anti-IL12p40 therapy (ustekinumab), Thalidomide, or Cytoxin. In some embodiments, the risk genotype is associated with thiopurine toxicity, or a disease or condition caused by thiopurine toxicity (such as pancreatitis or leukopenia). A subject may exhibit only one, or any combination of, the subclinical phenotypes disclosed herein, as well as others that would be readily apparent to a person of ordinary skill in the art.

[0083] In some embodiments the presence of the polymorphism is associated with an increase or decrease in expression of the genes listed in the first column of Table 1 or Table 2. A decrease in gene expression is represented by a negative “fold change” value (see column 2 in Table 1 and Table 2). An increase in gene expression is represented by a positive “fold change” value. In further embodiments provided, are methods of obtaining the sample from a subject with an inflammatory disease. As disclosed herein, gene expression may comprise expression of the DNA or RNA molecule, or protein molecule. Gene expression may be detected in a particular disease location. In some embodiments, the risk genotype is associated with an increase in gene expression in a region of the intestine comprising the ileum, colon, ileocolonic region, small bowel, or anus, or a combination thereof. In some embodiments, increased or decreased gene expression fold-change is observed The increase or decrease in expression may be an increase or decrease of 1.1-fold, 1.2-fold, 1.3-fold, 1.4-fold, 1.5 fold, 1.6-fold, 1.7-fold, 1.8-fold, 1.9-fold, 2.0-fold, 2.1-fold, 2.2-fold, 2.3-fold, 2.4-fold, 2.5-fold, 2.6-fold, 2.7-fold, 2.8-fold, 2.0-fold, 3.0-fold, 3.1-fold, 3.2-fold, 3.3-fold, 3.4-fold, 3.5-fold, 4-fold, 5-fold, 10-fold, 20-fold, 30-fold, 40-fold, 50-fold, or more between the sample obtained from the subject and an expression of the gene in an individual who does not express the risk genotype. In some embodiments, the expression of the gene in an individual who does not express the polymorphism is a control or standard In some embodiments, detection of only one or any combination of the polymorphisms of Table 1 and/or Table 2 is associated with an increase or decrease in expression of gene expression.

### D. Transcriptomic Risk Signature

[0084] In an aspect, provided herein, a transcriptomic risk signature is detected in a sample obtained from the subject for purposes of characterizing and/or treating an inflammatory disease using the methods disclosed herein. In some embodiments, transcriptomic risk signature comprises one or more genes. In some embodiments, a presence, absence, or level of expression of the one or more genes is detected for purposes of characterizing and/or treating an inflammatory disease using the methods disclosed herein. The genes may be involved in the mammalian innate and adaptive immune responses. In some embodiments, the gene locus is involved in the pathogenesis of inflammatory disease, such as IBD. In further embodiments, the gene locus is involved in autophagy, innate immunity, adaptive immunity, Wnt/beta-catenin signaling, the regulation of epithelial-mesenchymal transition, antigen presentation, or OX40 signaling. In some embodiments, the gene locus is involved in PDE4 mediated pathways, including EIF2 and cAMP signaling pathways.

[0085] The transcriptomic risk signature may comprise one or more genes from Table 3 and/or Table 4. In some embodiments, the transcriptomic risk signature comprises two, three, four, five, six, seven, eight, nine, or ten, genes from Table 3 and/or Table 4. In some embodiments, the transcriptomic risk signature comprises 10, 20, 20, 30, 40, 50, 60, 70, 80, 90, or 100 genes from Table 3 and/or Table 4. In some embodiments, the transcriptomic risk signature comprises genes that are uniquely associated with an inflammatory disease clinical subgroup. In some embodiments, the clinical subgroup comprises subjects with inflammatory disease that is characterized by a less severe form of disease (CD1). In some embodiments, the clinical subgroup comprises subjects with inflammatory disease that is characterized by a more severe form of disease (CD3). In some embodiments, the transcriptomic risk signature associated with the CD3 subgroup comprises genes from Table 3 and/or Table 4. Table 4 lists genes differentially expressed between the CD1 and CD3 subgroups, and uniquely associated with CD1 or CD3.

[0086] The transcriptomic risk signature may comprise: (a) a high level of expression of at least one of phosphodiesterase 4C (PDE4C), intercellular adhesion molecule 3 (ICAM3), interleukin 18 binding protein (IL18BP), and oncostatin-M-specific receptor subunit (OSMR), as compared to a reference level; and (b) a low level of expression of SMAD Family Member 3 (SMAD3), as compared to a reference level. In some embodiments, the transcriptomic risk signature comprises: (a) a high level of expression of at least two, three, or all four of PDE4C, ICAM3, IL18BP, and OSMR, as compared to a reference level; and (b) a low level of expression SMAD3, as compared to a reference level. In some cases, a transcriptomic risk profile is detected, which comprises a level of expression of a biomarkers described above. The level of expression for a transcriptomic risk profile is, in some cases, relative to a level of the reference level. In some embodiments, a “reference level” is a level of expression in an individual that does not have the disease or the condition (e.g., IBD). In some embodiments, the reference level is a level of expression in a patient who has a mild and non-refractory form of the disease or the condition.

[0087] The genes provided in Table 3 were identified as cis genes to the known IBD loci cis-eQTL in small bowel tissues obtained from CD patients. TRS was calculated using the methods in work by Marigorta, U. M, et al., Nature Genetics volume 49, pages 1517-1521 (2017), which is incorporated by reference herein in its entirety. Cis expression quantitative trait loci (eQTL), wihich explains the genetic variance at a particular genetic locus that is associated with an up- or down-regulation of a cis gene in small bowel tissues obtained from CD patients. Thus, the genes in Table 3 represent a unique transcriptomic signature with biological and genetic significance.

[0088] The genes provided in Table 3 are useful biomarkers for selecting a patient for treatment of, or identifying a patient to be at risk for developing, a severe form of CD characteristic of CD3.

TABLE 3
Genes Used to
Calculate the
Transcriptomic
Risk Score
(TRS)
AKAP11
ALDH2
ANKRD55
APEH
ASXL1
ATG16L1
BACH2
BANF1
CALM3
CARD9
CCDC101
CD226
CD244
CD28
CD40
CDC42SE2
CDKN2D
CEBPB
CISD1
COMMD7
CPEB4
CTSW
DAP
DAP3
DNAJC27
DUSP16
EDEM2
EEF1A2
EIF2B4
EP300
EPHB4
FADS1
FADS2
FCAR
FCGR2B
FCGR3B
FIBP
GALC
GNA12
GNG8
GNPDA1
GPR35
GSDMB
HHEX
ICAM3
ICAM4
IFNG
IKZF3
IL18R1
IL18RAP
IL1R2
INPP5E
IRF1
IRF5
ITIH4
KEAP1
KIR2DL4
KIR2DS4
KIR3DL1
LGALS9
LIME1
LNPEP
LY9
MANBA
MAP3K8
MEI1
MRPL20
MUS81
NCKIPSD
NDFIP1
NFATC1
NFKB1
NRBP1
ORMDL3
PARK7
PDGFB
PF4V1
PFKFB4
PLA2R1
PLCH2
PLCL1
PMM1
PNKD
POP7
PTGER4
PTGIR
PTGS2
PTK2B
PTPN22
PTPRC
RAB24
RGS14
RNASET2
RNF145
RORC
RPS6KA4
RSPH3
SBK1
SDCCAG3
SDF4
SDHC
SERINC3
SF3A1
SH2B3
SKAP2
SLC11A1
SLC15A3
SLC22A4
SLC22A5
SLC7A6
SMAD3
SNAPC4
SOCS1
SP110
SP140
SPHK2
SSU72
STAT3
SYNGR1
SYT11
TEF
THEM4
TIMP2
TM9SF4
TMEM180
TMEM50B
TNFRSF14
TNFRSF18
TNFRSF4
TNFSF8
TNPO3
TRIM8
TRPT1
TYK2
USF1
USP4
WSB1
ZFP90
ZGPAT

[0089] The genes provided in Table 4 are consolidated from Table 2, and represent the genes up-or-down-regulated in CD3 as compared to CD1. The genes provided in Table 4 are useful biomarkers for selecting a patient for treatment of, or identifying a patient to be at risk for developing, a severe form of CD characteristic of CD3. The directionality of expression of the genes in Table 4 can be determined by the fold change value corresponding to the gene in Table 2. A positive fold change value indicates an upregulation of the gene, and a negative fold change value indicates a downregulation of the gene.

[0090] In some cases, the genes provided in Table 4 correspond to cis eQTL of the gene in small bowel tissue obtained from CD patients. The genes additionally corresponding to cis eQTL include, bromodomain containing 2 (BRD2), major histocompatibility complex, class II, DQ alpha 2 (HLA-DQA2), kinesin family member 21B (KIF21B), Protocadherin 7 (PCDH7), Ankyrin 3 (ANK3), Tripartite Motif Containing 38 (TRIM38), Cytochrome P450 Family 4 Subfamily V Member 2 (CYP4V2), Vesicle Associated Membrane Protein 3 (VAMIP3). This subset of genes is useful biomarkers, with both biological and genetic significance, constitute a transcriptomic risk signature that may be detected either by detecting a level of the gene expression products (mRNA, protein) or detecting a presence of a corresponding polymorphism in Table 2.

TABLE 4
Gene Loci (Genes) differentially expressed between CD1 and CD3
and uniquely associated with CD1 or CD3 genotype

| | | | | |
|---|---|---|---|---|
| TYMP | S1PR2 | GPR17 | FOXO1 | SLC17A4 |
| PACS1 | FMO1 | MBNL1 | C19orf60 | PIGT |
| CNNM2 | VARS2 | SEMA3F | SMG7-AS1 | MRVI1 |
| COL5A1 | MAPK11 | IFT172 | PDE4C | HNF1A |
| SLC9A3 | BEST3 | SORCS3 | PCDH7 | ALPL |
| MAGI3 | FAM71B | IL37 | ACKR2 | PTPN11 |
| FYB | MAST2 | ARSB | APOB | RPL6 |
| CFL1P1 | TNS3 | ZNF609 | CTU2 | PAK2 |
| PPARGC1B | MME | VAV3 | C5orf56 | SAR1B |
| DTX3 | GPX4 | FAM178B | PCSK5 | TCF7 |
| BAK1 | PSMA6 | G6PC2 | LSP1 | PPP2CA |
| SSC5D | MTMR9LP | SMPD3 | MIR210HG | DDC |
| DAAM2 | HLA-DOA | RPL3 | TRIM15 | C3orf20 |
| DOCK10 | FKBP5 | PSMD5 | TNS1 | HLA-DQA2 |
| MTR | TCEA3 | POU5F1 | OSBP | RPL30 |
| COL4A2 | LOC728175 | TNXB | FBXL5 | HLA-DMB |
| TNR | CEP72 | CLPTM1L | GATA4 | CLCN6 |
| PECAM1 | TCF4 | MTTP | ARHGEF10L | SNAP47 |
| SLAIN2 | VNN1 | GRM4 | BCR | LRRC56 |
| KLHDC7B | NFIA | OPCML | FER1L4 | LZTFL1 |
| GIT2 | HHAT | GLB1 | LEMD2 | XCR1 |
| SMAD3 | DKFZP434K028 | ANK3 | MPPED1 | AVIL |
| ST6GALNAC5 | LCE1F | CTSH | FRMD4A | HLA-DMA |
| MYO16 | WNK1 | CYP4V2 | UBE2E3 | AGAP2 |
| TBX19 | HLA-DPA1 | ATF6B | CFAP69 | IGFBP7 |
| PHLDB2 | SNAPC4 | DNMT3A | AP1G1 | RPL18 |
| LRRC4C | NMD3 | AFF3 | OSBPL5 | DGKD |
| ULK1 | LTB4R | SMG7 | BRD2 | SMARCA4 |
| PCGF3 | P4HA2 | PLBD1 | PRKCA | DLC1 |
| MTSS1 | LAT | VAMP3 | XPO1 | PIP5K1C |
| LCE1C | IGFBP4 | HIST1H1A | KIF21B | HNF4A |
| MSRA | ITPKB | TRIM38 | MACROD2 | ALDH2 |
| GGNBP2 | IFNGR1 | THRB | CD209 | UQCR10 |
| ST8SIA2 | SYMPK | NELFE | MPZL3 | CHRM3 |
| CDK13 | RASSF7 | CEP85L | RORA | |

[0091] Genes provided in Table 4 were narrowed to a set of 17 genes listed in Table 13 that have been determined to drive specific gene pathways (e.g, cAMP, or RhoGDI) based on the overlap observed of genetics and expression between CD1 and CD3 subgroups. This subset of genes is useful biomarkers, with both biological and genetic significance, constitute a transcriptomic risk signature that may be detected either by detecting a level of the gene expression products (mRNA, protein) or detecting a presence of a corresponding polymorphism provided in Table 2.

[0092] The genes provided in Table 4 and Table 3 were overlapped to identify genes with both biological and genetic significance. Aldehyde Dehydrogenase 2 Family Member (ALDH2) was identified ALDH2 is downregulated in CD3, as indicated by the negative fold change value corresponding to rs7296651, provided in Table 2.

[0093] The transcriptional risk signature (TRSig) disclosed herein may include one or more genes provided in Table 3 or Table 4. In preferred embodiments, genes with biological and genetic significance that have the highest predictive value for a severe CD phenotype (e.g., CD3) constitute the TRSig.

[0094] Genes provided in Table 2 that had cis eQTL in the small bowel expression data (p<0.01), were identified as a subset of biomarkers with both biological an genetic significance that may be useful as biomarkers highly predictive of severe CD phenotype. The genes include bromodomain containing 2 (BRD2), major histocompatibility complex, class II, DQ alpha 2 (HLA-DQA2), kinesin family member 21B (KIF21B), Protocadherin 7 (PCDH7), Ankyrin 3 (ANK3), Tripartite Motif Containing 38 (TRIM38), Cytochrome P450 Family 4 Subfamily V Member 2 (CYP4V2), Vesicle Associated Membrane Protein 3 (VAMP3).

[0095] Provided herein are transcriptomic risk signatures involving protein tyrosine phosphatase, non-receptor type 11 (PTPN11) that are useful for the diagnosis and treatment of inflammatory bowel disease (IBD), such as Crohn's disease (CD) and ulcerative colitis (UC). In some cases, the transcriptomic risk signature is a downregulation of PTPN11, as compared to a normal (e.g, non-diseased individual), or an individual with a less severe form of CD, such as CD1. In some cases, the transcriptomic risk signature is detected by detecting a level of gene expression product expressed from PTPN11. In some cases, the transcriptomic risk signature is detected by detecting a presence of a single nucleotide polymorphism (SNP) associated with the downregulation of PTPN11. In some cases, the SNP is at rs2301756 and comprises a “G” allele, which is provided in SEQ ID NO: 339. In some cases, the SNP is rs7958372 and comprises an “A” allele, which is provided in SEQ ID NO: 408.

[0096] Also provided are transcriptomic risk signatures involving ribosomal protein (RL30) are useful for the diagnosis and treatment of IBD, such as CD and UC. In some cases, the transcriptomic risk signature is a downregulation of RPL30, as compared to a normal (e.g., non-diseased individual), or an individual with a less severe form of CD, such as CD1. In some cases, the transcriptomic risk signature is detected by detecting a level of gene expression product expressed from RPL30. In some cases, the transcriptomic risk signature is detected by detecting a presence of a SNP associated with the downregulation of RPL30. In some cases, the SNP is at rs2877453 and comprises a “C” allele, which is provided in SEQ ID NO: 353.

[0097] Disclosed herein are transcriptomic risk signatures involving X-C motif chemokine receptor 1 (XCR1) are useful for the diagnosis and treatment of IBD, such as CD and UC. In some cases, the transcriptomic risk signature is an upregulation of XCR1, as compared to a normal (e.g., non-diseased individual), or an individual with a less severe form of CD, such as CD1. In some cases, the transcriptomic risk signature is detected by detecting a level of gene expression product expressed from XCR1. In some cases, the transcriptomic risk signature is detected by detecting a presence of a SNP associated with the upregulation of XCR1. In some cases, the SNP is selected from the group consisting of a G at rs36040135 (SEQ ID NO: 378), a “G” at rs13074382 (SEQ ID NO: 379), a “G” at rs13097556 (SEQ ID NO: 380), a “G” at rs2230322 (SEQ ID NO: 381), and an “A” at rs71327010 (SE ID NO: 382).

[0098] Also disclosed herein are transcriptomic risk signatures involving HNF1 homeobox A (HNF1A) are useful for the diagnosis and treatment of IBD, such as CD and UC. In some cases, the transcriptomic risk signature is an upregulation of HNF1A, as compared to a normal (e.g, non-diseased individual), or an individual with a less severe form of CD, such as CD1. In some cases, the transcriptomic risk signature is detected by detecting a level of gene expression product expressed from HNF1. In some cases, the transcriptomic risk signature is detected by detecting a presence of a SNP associated with the upregulation of HNF1A In some cases, the SNP is selected from the group consisting of a “G” at rs2244608 (SEQ ID NO: 424), a “C” at rs1169302 (SEQ ID NO: 336), and a “G” at rs1169303G (SEQ ID NO: 337).

[0099] Provided herein are transcriptomic risk signatures involving ribosomal protein L3 (RPL3) are useful for the diagnosis and treatment of IBD, such as CD and UC. In some cases, the transcriptomic risk signature is a downregulation of RPL3, as compared to a normal (e.g, non-diseased individual), or an individual with a less severe form of CD, such as CD1. In some cases, the transcriptomic risk signature is detected by detecting a level of gene expression product expressed from RPL3 In some cases, the transcriptomic risk signature is detected by detecting a presence of a SNP associated with the downregulation of RPL3. In some cases, the SNP is an “A” at rs6519183, which is provided in SEQ ID NO: 174.

[0100] Also provided herein are transcriptomic risk signatures involving cholinergic receptor muscarinic 3 (CHRM3) are useful for the diagnosis and treatment of IBD, such as CD and UC. In some cases, the transcriptomic risk signature is a upregulation of CHRM3, as compared to a normal (e.g, non-diseased individual), or an individual with a less severe form of CD, such as CD1. In some cases, the transcriptomic risk signature is detected by detecting a level of gene expression product expressed from CHRM3. In some cases, the transcriptomic risk signature is detected by detecting a presence of a SNP associated with the upregulation of CHRM3. In some cases, the SNP is a “C” at rs685548, which is provided in SEQ ID NO: 423.

[0101] Disclosed herein are transcriptomic risk signatures involving DLC1 Rho GTPase activating protein (DLC1) are useful for the diagnosis and treatment of IBD, such as CD and UC. In some cases, the transcriptomic risk signature is a downregulation of DLC1, as compared to a normal (e.g, non-diseased individual), or an individual with a less severe form of CD, such as CD1. In some cases, the transcriptomic risk signature is detected by detecting a level of gene expression product expressed from DLC1. In some cases, the transcriptomic risk signature is detected by detecting a presence of a SNP associated with the downregulation of DLC1. In some cases, the SNP is an “A” at rs11998187A, which is provided in SEQ ID NO: 404.

[0102] Also disclosed herein are transcriptomic risk signatures involving apolipoprotein B (APOB) are useful for the diagnosis and treatment of IBD, such as CD and UC. In some cases, the transcriptomic risk signature is a downregulation of APOB, as compared to a normal (e.g, non-diseased individual), or an individual with a less severe form of CD, such as CD1. In some cases, the transcriptomic risk signature is detected by detecting a level of gene expression product expressed from APOB. In some cases, the transcriptomic risk signature is detected by detecting a presence of a SNP associated with the downregulation of APOB. In some cases, the SNP is selected from the group consisting of an “A” at rs531819 (SEQ ID NO: 258), a “G” at rs1041968 (SEQ ID NO: 354), a “G” at rs693 (SEQ ID NO: 388), an “A” at rs512535 (SEQ ID NO: 400), a “G” at rs550619 (SEQ ID NO: 406), an “A” at rs570877 (SEQ ID NO: 407), and a “G” at rs12713956 (SEQ ID NO: 437)

[0103] Provided herein are transcriptomic risk signatures involving ribosomal protein L6 (RPL6) are useful for the diagnosis and treatment of IBD, such as CD and UC. In some cases, the transcriptomic risk signature is a downregulation of RPL6, as compared to a normal (e.g, non-diseased individual), or an individual with a less severe form of CD, such as CD1. In some cases, the transcriptomic risk signature is detected by detecting a level of gene expression product expressed from RPL6. In some cases, the transcriptomic risk signature is detected by detecting a presence of a SNP associated with the downregulation of RPL6. In some cases, the SNP is an “A” at rs2301723A, which is provided in SEQ ID NO: 340.

[0104] Also provided herein are transcriptomic risk signatures involving glutamate metabotropic receptor 4 (GRM4) are useful for the diagnosis and treatment of IBD, such as CD and UC. In some cases, the transcriptomic risk signature is an upregulation of GRM4, as compared to a normal (e.g., non-diseased individual), or an individual with a less severe form of CD, such as CD1. In some cases, the transcriptomic risk signature is detected by detecting a level of gene expression product expressed from GRM4. In some cases, the transcriptomic risk signature is detected by detecting a presence of a SNP associated with the upregulation of GRM4. In some cases, the SNP is an “A” at rs2499714A, which is provided in SEQ ID NO: 181.

[0105] Disclosed herein are transcriptomic risk signatures involving p21 (RAC1) activated kinase 2 (PAK2) are useful for the diagnosis and treatment of IBD, such as CD and UC. In some cases, the transcriptomic risk signature is a downregulation of PAK2, as compared to a normal (e.g., non-diseased individual), or an individual with a less severe form of CD, such as CD1. In some cases, the transcriptomic risk signature is detected by detecting a level of gene expression product expressed from PAK2. In some cases, the transcriptomic risk signature is detected by detecting a presence of a SNP associated with the downregulation of PAK2. In some cases, the SNP is an “A” at rs6583176, which is provided in SEQ ID NO: 341.

[0106] Also disclosed herein are transcriptomic risk signatures involving ribosomal protein L18 (RPL18) are useful for the diagnosis and treatment of IBD, such as CD and UC. In some cases, the transcriptomic risk signature is a downregulation of RPL18, as compared to a normal (e.g., non-diseased individual), or an individual with a less severe form of CD, such as CD1. In some cases, the transcriptomic risk signature is detected by detecting a level of gene expression product expressed from RPL18. In some cases, the transcriptomic risk signature is detected by detecting a presence of a SNP associated with the downregulation of RPL18. In some cases, the SNP is an “A” at rs369880, which is provided in SEQ ID NO: 395.

[0107] Provided herein are transcriptomic risk signatures involving phosphodiesterase 4C (PDE4C) are useful for the diagnosis and treatment of IBD, such as CD and UC. In some cases, the transcriptomic risk signature is an upregulation of PDE4C, as compared to a normal (e.g, non-diseased individual), or an individual with a less severe form of CD, such as CD1. In some cases, the transcriptomic risk signature is detected by detecting a level of gene expression product expressed from PDE4C. In some cases, the transcriptomic risk signature is detected by detecting a presence of a SNP associated with the upregulation of PDE4C. In some cases, the SNP is a “G” at rs57884093G, which is provided in SEQ ID NO: 396.

[0108] Also provided herein are transcriptomic risk signatures involving protein kinase C alpha (PRKCA) are useful for the diagnosis and treatment of IBD, such as CD and UC. In some cases, the transcriptomic risk signature is an upregulation or downregulation of PRKCA, as compared to a normal (e.g., non-diseased individual), or an individual with a less severe form of CD, such as CD1. In some cases, the transcriptomic risk signature is detected by detecting a level of gene expression product expressed from PRKCA In some cases, the transcriptomic risk signature is detected by detecting a presence of a SNP associated with the upregulation or downregulation of PRKCA. In some cases, the SNP is an “A” at rs9896905, which is provided in SEQ ID NO: 321.

[0109] Disclosed herein are transcriptomic risk signatures involving protein phosphatase 2 catalytic subunit alpha (PPP2CA) are useful for the diagnosis and treatment of IBD, such as CD and UC. In some cases, the transcriptomic risk signature is a downregulation of PPP2CA, as compared to a normal (e.g., non-diseased individual), or an individual with a less severe form of CD, such as CD1. In some cases, the transcriptomic risk signature is detected by detecting a level of gene expression product expressed from PPP2CA. In some cases, the transcriptomic risk signature is detected by detecting a presence of a SNP associated with the downregulation of PPP2CA In some cases, the SNP is an “A” at rs7704116, which is provided in SEQ ID NO: 348.

[0110] Also disclosed herein are transcriptomic risk signatures involving phosphatidylinositol-4-phosphate 5-kinase type 1 gamma (PIP5K1C) are useful for the diagnosis and treatment of IBD, such as CD and UC. In some cases, the transcriptomic risk signature is an upregulation or a downregulation of PIP5K1C, as compared to a normal (e.g, non-diseased individual), or an individual with a less severe form of CD, such as CD1. In some cases, the transcriptomic risk signature is detected by detecting a level of gene expression product expressed from PIP5K1C. In some cases, the transcriptomic risk signature is detected by detecting a presence of a SNP associated with the downregulation of PIP5K1C. In some cases, the SNP is an “A” at rs12984273, which is provided in SEQ ID NO: 405.

[0111] Provided herein are transcriptomic risk signatures involving histone cluster 1 H1 family member A (HIST1H1A) are useful for the diagnosis and treatment of IBD, such as CD and UC. In some cases, the transcriptomic risk signature is a downregulation of HIST1H1A, as compared to a normal (e.g., non-diseased individual), or an individual with a less severe form of CD, such as CD1. In some cases, the transcriptomic risk signature is detected by detecting a level of gene expression product expressed from HIST1H1A In some cases, the transcriptomic risk signature is detected by detecting a presence of a SNP associated with the downregulation of HIST1HA In some cases, the SNP is a “G” at rs16891235, which is provided in SEQ ID NO: 236.

[0112] Provided herein are transcriptomic risk signatures involving Aldehyde Dehydrogenase 2 Family Member (ALDH2) that are useful for the diagnosis and treatment of inflammatory bowel disease (IBD), such as Crohn's disease (CD) and ulcerative colitis (UC). In some cases, the transcriptomic risk signature is a downregulation of ALDH2, as compared to a normal (e.g, non-diseased individual), or an individual with a less severe form of CD, such as CD1. In some cases, the transcriptomic risk signature is detected by detecting a level of gene expression product expressed from ALDH2. In some cases, the transcriptomic risk signature is detected by detecting a presence of a single nucleotide polymorphism (SNP) associated with the downregulation of ALDH2. In some cases, the SNP is at rs7296651 and comprises a “C” allele, which is provided in SEQ ID NO: 412.

[0113] Also disclosed herein are transcriptomic risk signatures involving BRD2, which is predictive of a risk of developing a severe form of CD characteristic of CD3. In some cases, the transcriptomic risk signature is a downregulation of BRD2, as compared to a normal (e.g, non-diseased individual), or an individual with a less severe form of CD, such as CD1. In some cases, the transcriptomic risk signature is detected by detecting a level of gene expression product expressed from BRD2. In some cases, the transcriptomic risk signature is detected by detecting a presence of a SNP associated with the downregulation of BRD2. In some cases, the SNP is at is rs516535 and comprises an “A” allele, which is provided in SEQ ID NO: 320.

[0114] Provided herein are transcriptomic risk signatures involving HLA-DQA2, which is predictive of a risk of developing a severe form of CD characteristic of CD3. In some cases, the transcriptomic risk signature is a downregulation or upregulation of HLA-DQA2, as compared to a normal (e.g., non-diseased individual), or an individual with a less severe form of CD, such as CD1. In some cases, the transcriptomic risk signature is detected by detecting a level of gene expression product expressed from HLA-DQA2. In some cases, the transcriptomic risk signature is detected by detecting a presence of a SNP associated with the downregulation or the upregulation of AHLA-DQA2. In some cases, the SNP is at rs9276427 and comprises an “A’ allele, which is provided in SEQ ID NO: 351.

[0115] Also provided herein are transcriptomic risk signatures involving KIF21B, which is predictive of a risk of developing a severe form of CD characteristic of CD3. In some cases, the transcriptomic risk signature is an upregulation of KIF21B, as compared to a normal (e.g, non-diseased individual), or an individual with a less severe form of CD, such as CD1. In some cases, the transcriptomic risk signature is detected by detecting a level of gene expression product expressed from KIF21B. In some cases, the transcriptomic risk signature is detected by detecting a presence of a SNP associated with the upregulation of KIF21B. In some cases, the SNP is at rs296564 and comprises an “A” allele, which is provided in SEQ ID NO: 323. In some cases, the SNP is at rs296569 and comprises a “A” allele, which is provided in SEQ ID NO: 331. In some cases, the SNP is and comprises an “A” allele, which is provided in SEQ ID NO: 332. In some cases, the SNP is at rs296567 and comprises a “G” allele, which is provided in SEQ ID NO: 333. In some cases, the SNP is at rs296561 and comprises a “G” allele, which is provided in SEQ ID NO: 334. In some cases, the SNP is at rs72749142 and comprises a “G” allele, which is provided in SEQ ID NO: 389.

[0116] Disclosed herein are transcriptomic risk signatures involving PCDH7, which is predictive of a risk of developing a severe form of CD characteristic of CD3. In some cases, the transcriptomic risk signature is a downregulation of PCDH7, as compared to anormal (e.g, non-diseased individual), or an individual with a less severe form of CD, such as CD1. In some cases, the transcriptomic risk signature is detected by detecting a level of gene expression product expressed from PCDH7. In some cases, the transcriptomic risk signature is detected by detecting a presence of a SNP associated with the downregulation of PCDH7. In some cases, the SNP is at rs9291547 and comprises an “A” allele, which is provided in SEQ ID NO: 255.

[0117] Also disclosed herein are transcriptomic risk signatures involving ANK3, which is predictive of a risk of developing a severe form of CD characteristic of CD3. In some cases, the transcriptomic risk signature is a downregulation of ANK3, as compared to a normal (e.g, non-diseased individual), or an individual with a less severe form of CD, such as CD1. In some cases, the transcriptomic risk signature is detected by detecting a level of gene expression product expressed from ANK3. In some cases, the transcriptomic risk signature is detected by detecting a presence of a SNP associated with the downregulation of ANK. In some cases, the SNP is at rs10761532 and comprises an “A” allele, which is provided in SEQ ID NO: 194. In some cases, the SNP is at rs10821813 and comprises an “A” allele, which is provided in SEQ ID NO: 195. In some cases, the SNP is at rs1561852 and comprises a “C” allele, which is provided in SEQ ID NO: 196. In some cases, the SNP is at rs10994464 and comprises an “A” allele, which is provided in SEQ ID NO: 204. In some cases, the SNP is at rs993402 and comprises a “G” allele, which is provided in SEQ ID NO: 205. In some cases, the SNP is at rs10994467 and comprises an “A” allele, which is provided in SEQ ID NO: 206. In some cases, the SNP is at rs10821822 and comprises an “A” allele, which is provided in SEQ ID NO: 207. In some cases, the SNP is at rs1837949 and comprises a “G” allele, which is provided in SEQ ID NO: 208. In some cases, the SNP is at rs35597961 and comprises a “C” allele, which is provided in SEQ ID NO: 209. In some cases, the SNP is at rs10821830 and comprises a “G” allele, which is provided in SEQ ID NO: 210. In some cases, the SNP is at rs975262 and comprises an “A” allele, which is provided in SEQ ID NO: 211. In some cases, the SNP is at rs973067 and comprises an “A” allele, which is provided in SEQ ID NO: 212. In some cases, the SNP is at rs10509139 and comprises a “G” allele, which is provided in SEQ ID NO: 213. In some cases, the SNP is at rs1442539 and comprises an “A” allele, which is provided in SEQ ID NO: 214. In some cases, the SNP is at rs2197155 and comprises an “A” allele, which is provided in SEQ ID NO: 215. In some cases, the SNP is at rs7919914 and comprises a “G” allele, which is provided in SEQ ID NO: 216. In some cases, the SNP is at rs10994476 and comprises a “G” allele, which is provided in SEQ ID NO: 275. In some cases, the SNP is at rs35471473 and comprises an “A” allele, which is provided in SEQ ID NO: 243. In some cases, the SNP is at rs12785023 and comprises a “G” allele, which is provided in SEQ ID NO: 244. In some cases, the SNP is at rs12783716 and comprises a “G” allele, which is provided in SEQ ID NO: 245. In some cases, the SNP is at rs10821821 and comprises a “G” allele, which is provided in SEQ ID NO: 246. In some cases, the SNP is at rs10994441 and comprises a “G” allele, which is provided in SEQ ID NO: 284. In some cases, the SNP is at rs10994442 and comprises a “C” allele, which is provided in SEQ ID NO: 285. In some cases, the SNP is at rs10821814 and comprises a “T” allele, which is provided in SEQ ID NO: 286. In some cases, the SNP is at rs10994465 and comprises an “A” allele, which is provided in SEQ ID NO: 287. In some cases, the SNP is at rs12218617 and comprises a “T” allele, which is provided in SEQ ID NO: 288. In some cases, the SNP is at rs10509138 and comprises a “C” allele, which is provided in SEQ ID NO: 289. In some cases, the SNP is at rs61854518 and comprises an “A” allele, which is provided in SEQ ID NO: 290. In some cases, the SNP is at rs10821699 and comprises a “G” allele, which is provided in SEQ ID NO: 345. In some cases, the SNP is at rs7919274 and comprises a “G” allele, which is provided in SEQ ID NO: 352. In some cases, the SNP is at rs10761552 and comprises an “A” allele, which is provided in SEQ ID NO: 368. In some cases, the SNP is at rs17037425 and comprises a “G” allele, which is provided in SEQ ID NO: 369. In some cases, the SNP is at rs2893861 and comprises an “A” allele, which is provided in SEQ ID NO: 370. In some cases, the SNP is at rs1993939 and comprises a “C” allele, which is provided in SEQ ID NO: 371. In some cases, the SNP is at rs10821833 and comprises a “G” allele, which is provided in SEQ ID NO: 372. In some cases, the SNP is at rs1904418 and comprises a “G” allele, which is provided in SEQ ID NO: 373. In some cases, the SNP is at rs16915196 and comprises a “G” allele, which is provided in SEQ ID NO: 432. In some cases, the SNP is at rs61853514 and comprises an “A” allele, which is provided in SEQ ID NO: 433. In some cases, the SNP is at rs10994430 and comprises an “A” allele, which is provided in SEQ ID NO: 434. In some cases, the SNP is at rs16915231 and comprises an “A” allele, which is provided in SEQ ID NO: 435. In some cases, the SNP is at rs2028564 and comprises a “G” allele, which is provided in SEQ ID NO: 436.

[0118] Provided herein are transcriptomic risk signatures involving TRIM38, which is predictive of a risk of developing a severe form of CD characteristic of CD3. In some cases, the transcriptomic risk signature is a downregulation of TRIM38, as compared to a normal (e.g., non-diseased individual), or an individual with a less severe form of CD, such as CD1. In some cases, the transcriptomic risk signature is detected by detecting a level of gene expression product expressed from TRIM38. In some cases, the transcriptomic risk signature is detected by detecting a presence of a SNP associated with the downregulation of TRIM38. In some cases, the SNP is at rs13196552 and comprises a “G” allele, which is provided in SEQ ID NO: 237. In some cases, the SNP is at rs17587597 and comprises an “A” allele, which is provided in SEQ ID NO: 282. In some cases, the SNP is at rs17587226 and comprises an “A” allele, which is provided in SEQ ID NO: 301.

[0119] Also provided herein are transcriptomic risk signatures involving CYP4V2, which is predictive of a risk of developing a severe form of CD characteristic of CD3. In some cases, the transcriptomic risk signature is a downregulation of CYP4V2, as compared to a normal (e.g, non-diseased individual), or an individual with a less severe form of CD, such as CD1. In some cases, the transcriptomic risk signature is detected by detecting a level of gene expression product expressed from CYP4V2. In some cases, the transcriptomic risk signature is detected by detecting a presence of a SNP associated with the downregulation of CYP4V2. In some cases, the SNP is at rs2276917 and comprises an “A” allele, which is provided in SEQ ID NO: 200. In some cases, the SNP is at rs10013653 and comprises an “A” allele, which is provided in SEQ ID NO: 312.

[0120] Provided herein are transcriptomic risk signatures involving VAMP3, which is predictive of a risk of developing a severe form of CD characteristic of CD3. In some cases, the transcriptomic risk signature is a downregulation of VAMP3, as compared to a normal (e.g., non-diseased individual), or an individual with a less severe form of CD, such as CD1. In some cases, the transcriptomic risk signature is detected by detecting a level of gene expression product expressed from VAMP3. In some cases, the transcriptomic risk signature is detected by detecting a presence of a SNP associated with the downregulation of VAMP3. In some cases, the SNP is at rs11582799 and comprises an “A” allele, which is provided in SEQ ID NO: 222. In some cases, the SNP is at rs111692854 and comprises an “A” allele, which is provided in SEQ ID NO: 223. In some cases, the SNP is at rs72632053 and comprises an “A” allele, which is provided in SEQ ID NO: 224.

### E. Methods of Treatment

[0121] Disclosed herein are methods of treating an inflammatory disease in a subject, by administering a therapeutically effective amount of a therapeutic agent to the subject, provided a risk genotype or a transcriptomic risk signature is detected in a sample obtained from the subject. In some embodiments, methods comprise diagnosing the inflammatory disease in the subject. In some cases, a presence of the risk genotype or transcriptomic risk signature is used to diagnose the inflammatory disease. Alternatively, in some embodiments, the subject has been previously diagnosed with the inflammatory disease, and methods comprise characterizing the inflammatory disease as inflammatory bowel disease (IBD), or a subtype thereof. In some embodiments, methods comprise diagnosing the subject with Crohn's disease (UC) or ulcerative colitis (UC). In some embodiments, methods comprise diagnosing the subject with a severe or refractory form of the IBD, such as medically refractory CD.

[0122] In some cases, the risk genotype detected comprises a polymorphism provided in Table 2. The genotype may comprise two or more polymorphisms from Table 2. The genotype may comprise at least or about three, four, five, six, seven, eight, nine, 10, 11, 12, 13, 14, 15, 16, 17, 18, 19, 20, 21, 22, 23, 24, 25, 26, 27, 28, 29, 30, 31, 32, 33, 34, 35, 36, 37, 38, 39, 40 or more polymorphisms from Table 2. In some cases, the genotype is heterozygous for the “risk allele” provided in Table 2 (column seven). In some cases, the genotype is homozygous for the risk allele provided in Table 2. If two or more polymorphisms make up the genotype, then in some embodiments, the genotype for each polymorphism will be heterozygous or homozygous, for the risk allele. In this example, one genotype may be homozygous, and the other heterozygous, for the risk allele. In some cases, detecting a presence of the risk genotype in a sample obtained from a subject is indicative that the subject has, or will develop, the associated clinical or subclinical phenotype (e.g, severe and refractory Crohn's disease).

[0123] In some cases, the transcriptomic risk profile comprises two or more genes provided in Table 3 and/or Table 4. The transcriptomic risk profile comprises, in some embodiments, at least three, four, five, six, seven, eight, nine, 10, 11, 12, 13, 14, 15, 16, 17, 18, 19, 20, 21, 22, 23, 24, 25, 26, 27, 28, 29, 30, 31, 32, 33, 34, 35, 36, 37, 38, 39, 40 genes provided in Table 3 and/or Table 4. The transcriptomic risk profile may require all 139 genes provided in Table 3 and/or Table 4. In some cases, an expression of the gene is high as compared to an individual who does not have a severe or refractory form of the inflammatory disease. In some cases, an expression of the gene is low as compared to an individual who does not have a severe or refractory form of the inflammatory disease.

[0124] Provided herein are methods of selecting a subject for treatment, at least in part, because the subject is, or as been, identified as being at risk for developing a toxicity, anon-response, or a loss-of-response, to a standard therapy. In some cases, the subject is selected for treatment if the subject is, or is at risk for developing, thiopurine toxicity, or a disease caused by thiopurine toxicity (such as pancreatitis or leukopenia). In some cases, the subject is selected for treatment if the subject is, or is at risk for developing non-response or loss-of-response to a standard therapy. In some cases, the standard therapy is selected from the group consisting of anti-TNF alpha therapy, anti-a4-b7 therapy (vedolizumab), anti-IL12p40 therapy (ustekinumab), thiopurine, Thalidomide, Cytoxin, and a combination thereof.

[0125] Methods of treatment provided herein comprise administering to the subject at least one of an inhibitor of phosphodiesterase 4 (PDE4) and an agonist of adenylate cyclase 7 (ADCY7). In some embodiments, the inhibitor of PDE4 and the agonist of ADCY7 are administered separately. In some embodiments, the inhibitor of PDE4 is administered before the agonist of ADCY7. In some embodiments, the inhibitor of PDE4 is administered after the agonist of ADCY7. In some instances, an additional therapeutic agent is administered to the subject either alone, or in combination with at least one of the inhibitor of PDE4 and agonist of ADCY7.

[0126] Provided herein are methods of treating inflammatory bowel disease (IBD), such as Crohn's disease (CD) and ulcerative colitis (UC) in a subject, provided that a presence of a transcriptomic risk signature is detected in the subject. Once the transcriptomic risk signature is detected in the subject, in some cases, the subject is administered a therapeutically effective amount of an agonist of ADCY7 or an inhibitor of PDE4. The transcriptomic risk signature may involve one gene. Alternatively, the transcriptomic risk signature involves multiple genes, for e.g, 2, 3, 4, 5, 6, 7, 8, 9, 10, 11, 12, 13, 14, 15, 16, or 17 genes described herein.

[0127] Methods disclosed herein comprise detecting a transcriptomic risk signature in a subject, which in some cases involves detecting a level of protein tyrosine phosphatase, non-receptor type 11 (PTPN11). In some cases, the transcriptomic risk signature is a downregulation of PTPN11, as compared to a normal (e.g, non-diseased individual), or an individual with a less severe form of CD, such as CD1. In some cases, the transcriptomic risk signature is detected by detecting a level of gene expression product expressed from PTPN11. In some cases, the transcriptomic risk signature is detected by detecting a presence of a single nucleotide polymorphism (SNP) associated with the downregulation of PTPN11. In some cases, the SNP is at rs2301756 and comprises a “G” allele, which is provided in SEQ ID NO: 339. In some cases, the SNP is rs7958372 and comprises an “A” allele, which is provided in SEQ ID NO: 408. The transcriptomic signature may be detected with a single SNP. Alternatively, the transcriptomic risk signature may be detected with multiple SNPs described herein, for e.g, both rs2301756 and rs7958372. In some embodiments, a single SNP is detected. In some embodiments, more than one SNP is detected. In some embodiments, methods further comprise administering to the subject a therapeutically effective amount of a therapeutic agent disclosed herein (e.g., agonist of ADYC, inhibitor of PDE4).

[0128] Methods disclosed herein comprise detecting a transcriptomic risk signature in a subject, which in some cases involves detecting a level of ribosomal protein (RPL30). In some cases, the transcriptomic risk signature is a downregulation of RPL30, as compared to a normal (e.g., non-diseased individual), or an individual with a less severe form of CD, such as CD1. In some cases, the transcriptomic risk signature is detected by detecting a level of gene expression product expressed from RPL30. In some cases, the transcriptomic risk signature is detected by detecting a presence of a SNP associated with the downregulation of RPL30. In some cases, the SNP is at rs2877453 and comprises a “C” allele, which is provided in SEQ ID NO: 353. In some embodiments, a single SNP is detected. In some embodiments, more than one SNP is detected. In some embodiments, methods further comprise administering to the subject a therapeutically effective amount of a therapeutic agent disclosed herein (e.g., agonist of ADYC, inhibitor of PDE4).

[0129] Methods disclosed herein comprise detecting a transcriptomic risk signature in a subject, which in some cases involves detecting a level of X-C motif chemokine receptor 1 (XCR1) In some cases, the transcriptomic risk signature is an upregulation of XCR1, as compared to a normal (e.g., non-diseased individual), or an individual with a less severe form of CD, such as CD1. In some cases, the transcriptomic risk signature is detected by detecting a level of gene expression product expressed from XCR1. In some cases, the transcriptomic risk signature is detected by detecting a presence of a SNP associated with the upregulation of XCR1. In some cases, the SNP is selected from the group consisting of a G at rs36040135 (SEQ ID NO: 378), a “G” at rs13074382 (SEQ ID NO: 379), a “G” at rs13097556 (SEQ ID NO: 380), a “G” at rs2230322 (SEQ ID NO: 381), and an “A” at rs71327010 (SE ID NO: 382). The transcriptomic signature may be detected with a single SNP. Alternatively, the transcriptomic risk signature may be detected with multiple SNPs described herein, for e.g., two or more of rs36040135, rs13074382, rs13097556, rs2230322, and rs71327010. In some embodiments, a single SNP is detected. In some embodiments, more than one SNP is detected. In some embodiments, methods further comprise administering to the subject a therapeutically effective amount of a therapeutic agent disclosed herein (e.g., agonist of ADYC, inhibitor of PDE4).

[0130] Methods disclosed herein comprise detecting a transcriptomic risk signature in a subject, which in some cases involves detecting a level of HNF1 homeobox A (HNF1A). In some cases, the transcriptomic risk signature is an upregulation of HNF1A, as compared to a normal (e.g, non-diseased individual), or an individual with a less severe form of CD, such as CD1. In some cases, the transcriptomic risk signature is detected by detecting a level of gene expression product expressed from HNF1A In some cases, the transcriptomic risk signature is detected by detecting a presence of a SNP associated with the upregulation of HNF1A In some cases, the SNP is selected from the group consisting of a “G” at rs2244608 (SEQ ID NO: 424), a “C” at rs1169302 (SEQ ID NO: 336), and a “G” at rs1169303 (SEQ ID NO: 337). The transcriptomic signature may be detected with a single SNP. Alternatively, the transcriptomic risk signature may be detected with multiple SNPs described herein, e.g, two or more of rs2244608, rs1169302, and rs1169303. In some embodiments, a single SNP is detected In some embodiments, more than one SNP is detected In some embodiments, methods further comprise administering to the subject a therapeutically effective amount of a therapeutic agent disclosed herein (e.g., agonist of ADYC, inhibitor of PDE4).

[0131] Methods disclosed herein comprise detecting a transcriptomic risk signature in a subject, which in some cases involves detecting a level of ribosomal protein L3 (RPL3). In some cases, the transcriptomic risk signature is a downregulation of RPL3, as compared to a normal (e.g, non-diseased individual), or an individual with a less severe form of CD, such as CD1. In some cases, the transcriptomic risk signature is detected by detecting a level of gene expression product expressed from RPL3 In some cases, the transcriptomic risk signature is detected by detecting a presence of a SNP associated with the downregulation of RPL3. In some cases, the SNP is an “A” at rs6519183, which is provided in SEQ ID NO: 174. In some embodiments, a single SNP is detected. In some embodiments, more than one SNP is detected In some embodiments, methods further comprise administering to the subject a therapeutically effective amount of a therapeutic agent disclosed herein (e.g., agonist of ADYC, inhibitor of PDE4).

[0132] Methods disclosed herein comprise detecting a transcriptomic risk signature in a subject, which in some cases involves detecting a level of cholinergic receptor muscarinic 3 (CHRM3). In some cases, the transcriptomic risk signature is a upregulation of CHRM3, as compared to a normal (e.g, non-diseased individual), or an individual with a less severe form of CD, such as CD1. In some cases, the transcriptomic risk signature is detected by detecting a level of gene expression product expressed from CHRM3. In some cases, the transcriptomic risk signature is detected by detecting a presence of a SNP associated with the upregulation of CHRM3. In some cases, the SNP is a “C” at rs685548, which is provided in SEQ ID NO: 423. In some embodiments, a single SNP is detected. In some embodiments, more than one SNP is detected. In some embodiments, methods further comprise administering to the subject a therapeutically effective amount of a therapeutic agent disclosed herein (e.g., agonist of ADYC, inhibitor of PDE4).

[0133] Methods disclosed herein comprise detecting a transcriptomic risk signature in a subject, which in some cases involves detecting a level of DLC1 Rho GTPase activating protein (DLC1). In some cases, the transcriptomic risk signature is a downregulation of DLC1, as compared to a normal (e.g, non-diseased individual), or an individual with a less severe form of CD, such as CD1. In some cases, the transcriptomic risk signature is detected by detecting a level of gene expression product expressed from DLC1. In some cases, the transcriptomic risk signature is detected by detecting a presence of a SNP associated with the downregulation of DLC1. In some cases, the SNP is an “A” at rs11998187A, which is provided in SEQ ID NO: 404. In some embodiments, a single SNP is detected. In some embodiments, more than one SNP is detected. In some embodiments, methods further comprise administering to the subject a therapeutically effective amount of a therapeutic agent disclosed herein (e.g., agonist of ADYC, inhibitor of PDE4).

[0134] Methods disclosed herein comprise detecting a transcriptomic risk signature in a subject, which in some cases involves detecting a level of apolipoprotein B (APOB). In some cases, the transcriptomic risk signature is a downregulation of APOB, as compared to a normal (e.g, non-diseased individual), or an individual with a less severe form of CD, such as CD1. In some cases, the transcriptomic risk signature is detected by detecting a level of gene expression product expressed from APOB. In some cases, the transcriptomic risk signature is detected by detecting a presence of a SNP associated with the downregulation of APOB. In some cases, the SNP is selected from the group consisting of an “A” at rs531819 (SEQ ID NO: 258), a “G” at rs1041968 (SEQ ID NO: 354), a “G” at rs693 (SEQ ID NO: 388), an “A” at rs512535 (SEQ ID NO: 400), a “G” at rs550619 (SEQ ID NO: 406), an “A” at rs570877 (SEQ ID NO: 407), and a “G” at rs12713956 (SEQ ID NO: 437). The transcriptomic signature may be detected with a single SNP. Alternatively, the transcriptomic risk signature may be detected with multiple SNPs described herein, e.g, two or more of rs531819, rs1041968, rs693, rs512535, rs550619, rs570877, and rs12713956. In some embodiments, a single SNP is detected In some embodiments, more than one SNP is detected In some embodiments, methods further comprise administering to the subject a therapeutically effective amount of a therapeutic agent disclosed herein (e.g., agonist of ADYC, inhibitor of PDE4).

[0135] Methods disclosed herein comprise detecting a transcriptomic risk signature in a subject, which in some cases involves detecting a level of ribosomal protein L6 (RPL6). In some cases, the transcriptomic risk signature is a downregulation of RPL6, as compared to a normal (e.g, non-diseased individual), or an individual with a less severe form of CD, such as CD1. In some cases, the transcriptomic risk signature is detected by detecting a level of gene expression product expressed from RPL6. In some cases, the transcriptomic risk signature is detected by detecting a presence of a SNP associated with the downregulation of RPL6. In some cases, the SNP is an “A” at rs2301723A, which is provided in SEQ ID NO: 340. In some embodiments, a single SNP is detected. In some embodiments, more than one SNP is detected In some embodiments, methods further comprise administering to the subject a therapeutically effective amount of a therapeutic agent disclosed herein (e.g., agonist of ADYC, inhibitor of PDE4).

[0136] Methods disclosed herein comprise detecting a transcriptomic risk signature in a subject, which in some cases involves detecting a level of glutamate metabotropic receptor 4 (GRM4). In some cases, the transcriptomic risk signature is an upregulation of GRM4, as compared to a normal (e.g, non-diseased individual), or an individual with a less severe form of CD, such as CD1. In some cases, the transcriptomic risk signature is detected by detecting a level of gene expression product expressed from GRM4. In some cases, the transcriptomic risk signature is detected by detecting a presence of a SNP associated with the upregulation of GRM4. In some cases, the SNP is an “A” at rs2499714A, which is provided in SEQ ID NO: 181. In some embodiments, a single SNP is detected In some embodiments, more than one SNP is detected In some embodiments, methods further comprise administering to the subject a therapeutically effective amount of a therapeutic agent disclosed herein (e.g., agonist of ADYC, inhibitor of PDE4).

[0137] Methods disclosed herein comprise detecting a transcriptomic risk signature in a subject, which in some cases involves detecting a level of p21 (RAC1) activated kinase 2 (PAK2). In some cases, the transcriptomic risk signature is a downregulation of PAK2, as compared to a normal (e.g., non-diseased individual), or an individual with a less severe form of CD, such as CD1. In some cases, the transcriptomic risk signature is detected by detecting a level of gene expression product expressed from PAK2. In some cases, the transcriptomic risk signature is detected by detecting a presence of a SNP associated with the downregulation of PAK2. In some cases, the SNP is an “A” at rs6583176, which is provided in SEQ ID NO: 341. In some embodiments, a single SNP is detected. In some embodiments, more than one SNP is detected In some embodiments, methods further comprise administering to the subject a therapeutically effective amount of a therapeutic agent disclosed herein (e.g., agonist of ADYC, inhibitor of PDE4).

[0138] Methods disclosed herein comprise detecting a transcriptomic risk signature in a subject, which in some cases involves detecting a level of ribosomal protein L18 (RPL18). In some cases, the transcriptomic risk signature is a downregulation of RPL18, as compared to a normal (e.g., non-diseased individual), or an individual with a less severe form of CD, such as CD1. In some cases, the transcriptomic risk signature is detected by detecting a level of gene expression product expressed from RPL18. In some cases, the transcriptomic risk signature is detected by detecting a presence of a SNP associated with the downregulation of RPL18. In some cases, the SNP is an “A” at rs369880, which is provided in SEQ ID NO: 395. In some embodiments, a single SNP is detected. In some embodiments, more than one SNP is detected In some embodiments, methods further comprise administering to the subject a therapeutically effective amount of a therapeutic agent disclosed herein (e.g., agonist of ADYC, inhibitor of PDE4).

[0139] Methods disclosed herein comprise detecting a transcriptomic risk signature in a subject, which in some cases involves detecting a level of phosphodiesterase 4C (PDE4C). In some cases, the transcriptomic risk signature is an upregulation of PDE4C, as compared to a normal (e.g, non-diseased individual), or an individual with a less severe form of CD, such as CD1. In some cases, the transcriptomic risk signature is detected by detecting a level of gene expression product expressed from PDE4C. In some cases, the transcriptomic risk signature is detected by detecting a presence of a SNP associated with the upregulation of PDE4C. In some cases, the SNP is a “G” at rs57884093G, which is provided in SEQ ID NO: 396. In some embodiments, a single SNP is detected. In some embodiments, more than one SNP is detected In some embodiments, methods further comprise administering to the subject a therapeutically effective amount of a therapeutic agent disclosed herein (e.g., agonist of ADYC, inhibitor of PDE4).

[0140] Methods disclosed herein comprise detecting a transcriptomic risk signature in a subject, which in some cases involves detecting a level of protein kinase C alpha (PRKCA). In some cases, the transcriptomic risk signature is an upregulation or downregulation of PRKCA, as compared to a normal (e.g., non-diseased individual), or an individual with a less severe form of CD, such as CD1. In some cases, the transcriptomic risk signature is detected by detecting a level of gene expression product expressed from PRKCA In some cases, the transcriptomic risk signature is detected by detecting a presence of a SNP associated with the upregulation or downregulation of PRKCA. In some cases, the SNP is an “A” at rs9896905, which is provided in SEQ ID NO: 321. In some embodiments, a single SNP is detected. In some embodiments, more than one SNP is detected In some embodiments, methods further comprise administering to the subject a therapeutically effective amount of a therapeutic agent disclosed herein (e.g., agonist of ADYC, inhibitor of PDE4).

[0141] Methods disclosed herein comprise detecting a transcriptomic risk signature in a subject, which in some cases involves detecting a level of protein phosphatase 2 catalytic subunit alpha (PPP2CA). In some cases, the transcriptomic risk signature is a downregulation of PPP2CA, as compared to a normal (e.g, non-diseased individual), or an individual with a less severe form of CD, such as CD1. In some cases, the transcriptomic risk signature is detected by detecting a level of gene expression product expressed from PPP2CA. In some cases, the transcriptomic risk signature is detected by detecting a presence of a SNP associated with the downregulation of PPP2CA. In some cases, the SNP is an “A” at rs7704116, which is provided in SEQ ID NO: 348. In some embodiments, a single SNP is detected. In some embodiments, more than one SNP is detected. In some embodiments, methods further comprise administering to the subject a therapeutically effective amount of a therapeutic agent disclosed herein (e.g., agonist of ADYC, inhibitor of PDE4).

[0142] Methods disclosed herein comprise detecting a transcriptomic risk signature in a subject, which in some cases involves detecting a level of phosphatidylinositol-4-phosphate 5-kinase type 1 gamma (PIP5K1C). In some cases, the transcriptomic risk signature is an upregulation or a downregulation of PIP5K1C, as compared to a normal (e.g., non-diseased individual), or an individual with a less severe form of CD, such as CD1. In some cases, the transcriptomic risk signature is detected by detecting a level of gene expression product expressed from PIP5K1C. In some cases, the transcriptomic risk signature is detected by detecting a presence of a SNP associated with the downregulation of PIP5K1C. In some cases, the SNP is an “A” at rs12984273, which is provided in SEQ ID NO: 405. In some embodiments, a single SNP is detected. In some embodiments, more than one SNP is detected In some embodiments, methods further comprise administering to the subject a therapeutically effective amount of a therapeutic agent disclosed herein (e.g., agonist of ADYC, inhibitor of PDE4).

[0143] Methods disclosed herein comprise detecting a transcriptomic risk signature in a subject, which in some cases involves detecting a level of histone cluster 1 H1 family member A (HIST1H1A). In some cases, the transcriptomic risk signature is an upregulation of HIST1H1A, as compared to a normal (e.g, non-diseased individual), or an individual with a less severe form of CD, such as CD1. In some cases, the transcriptomic risk signature is detected by detecting a level of gene expression product expressed from HIST1H1A In some cases, the transcriptomic risk signature is detected by detecting a presence of a SNP associated with the upregulation of XCR10. In some cases, the SNP is a “G” at rs16891235, which is provided in SEQ ID NO: 236. In some embodiments, a single SNP is detected. In some embodiments, more than one SNP is detected. In some embodiments, methods further comprise administering to the subject a therapeutically effective amount of a therapeutic agent disclosed herein (e.g., agonist of ADYC, inhibitor of PDE4).

[0144] Methods disclosed herein comprise detecting a transcriptomic risk signature in a subject, which in some cases involves detecting a level of Aldehyde Dehydrogenase 2 Family Member (ALDH2). In some cases, the transcriptomic risk signature is a downregulation of ALDH2, as compared to a normal (e.g, non-diseased individual), or an individual with a less severe form of CD, such as CD1. In some cases, the transcriptomic risk signature is detected by detecting a level of gene expression product expressed from ALDH2. In some cases, the transcriptomic risk signature is detected by detecting a presence of a SNP associated with the downregulation of ALDH2. In some cases, the SNP is at rs7296651 and comprises a “C” allele, which is provided in SEQ ID NO: 412. In some embodiments, a single SNP is detected. In some embodiments, more than one SNP is detected In some embodiments, methods further comprise administering to the subject a therapeutically effective amount of a therapeutic agent disclosed herein (e.g., agonist of ADYC, inhibitor of PDE4).

[0145] Methods disclosed herein comprise detecting a transcriptomic risk signature in a subject, which in some cases involves detecting a level of BRD2, which is predictive of a risk of developing a severe form of CD characteristic of CD3. In some cases, the transcriptomic risk signature is a downregulation of BRD2, as compared to a normal (e.g., non-diseased individual), or an individual with a less severe form of CD, such as CD1. In some cases, the transcriptomic risk signature is detected by detecting a level of gene expression product expressed from BRD2. In some cases, the transcriptomic risk signature is detected by detecting a presence of a SNP associated with the downregulation of BRD2. In some cases, the SNP is at is rs516535 and comprises an “A” allele, which is provided in SEQ ID NO: 320. In some embodiments, a single SNP is detected In some embodiments, more than one SNP is detected In some embodiments, methods further comprise administering to the subject a therapeutically effective amount of a therapeutic agent disclosed herein (e.g., agonist of ADYC, inhibitor of PDE4).

[0146] Methods disclosed herein comprise detecting a transcriptomic risk signature in a subject, which in some cases involves detecting a level of HLA-DQA2, which is predictive of a risk of developing a severe form of CD characteristic of CD3. In some cases, the transcriptomic risk signature is a downregulation or upregulation of HLA-DQA2, as compared to a normal (e.g, non-diseased individual), or an individual with a less severe form of CD, such as CD1. In some cases, the transcriptomic risk signature is detected by detecting a level of gene expression product expressed from HLA-DQA2. In some cases, the transcriptomic risk signature is detected by detecting a presence of a SNP associated with the downregulation or the upregulation of AHLA-DQA2. In some cases, the SNP is at rs9276427 and comprises an “A’ allele, wihich is provided in SEQ ID NO: 351. In some embodiments, a single SNP is detected. In some embodiments, more than one SNP is detected In some embodiments, methods further comprise administering to the subject a therapeutically effective amount of a therapeutic agent disclosed herein (e.g., agonist of ADYC, inhibitor of PDE4).

[0147] Methods disclosed herein comprise detecting a transcriptomic risk signature in a subject, which in some cases involves detecting a level of KIF21B, which is predictive of a risk of developing a severe form of CD characteristic of CD3. In some cases, the transcriptomic risk signature is an upregulation of KIF21B, as compared to a normal (e.g, non-diseased individual), or an individual with a less severe form of CD, such as CD1. In some cases, the transcriptomic risk signature is detected by detecting a level of gene expression product expressed from KIF21B. In some cases, the transcriptomic risk signature is detected by detecting a presence of a SNP associated with the upregulation of KIF21B. In some cases, the SNP is at rs296564 and comprises an “A” allele, which is provided in SEQ ID NO: 323. In some cases, the SNP is at rs296569 and comprises a “A” allele, which is provided in SEQ ID NO: 331. In some cases, the SNP is and comprises an “A” allele, which is provided in SEQ ID NO: 332. In some cases, the SNP is at rs296567 and comprises a “G’ allele, which is provided in SEQ ID NO: 333. In some cases, the SNP is at rs296561 and comprises a “G” allele, which is provided in SEQ ID NO: 334. In some cases, the SNP is at rs72749142 and comprises a “G” allele, which is provided in SEQ ID NO: 389. In some embodiments, a single SNP is detected In some embodiments, more than one SNP is detected In some embodiments, methods further comprise administering to the subject a therapeutically effective amount of a therapeutic agent disclosed herein (e.g., agonist of ADYC, inhibitor of PDE4).

[0148] Methods disclosed herein comprise detecting a transcriptomic risk signature in a subject, which in some cases involves detecting a level of PCDH7, which is predictive of a risk of developing a severe form of CD characteristic of CD3. In some cases, the transcriptomic risk signature is a downregulation of PCDH7, as compared to a normal (e.g, non-diseased individual), or an individual with a less severe form of CD, such as CD1. In some cases, the transcriptomic risk signature is detected by detecting a level of gene expression product expressed from PCDH7. In some cases, the transcriptomic risk signature is detected by detecting a presence of a SNP associated with the downregulation of PCDH7. In some cases, the SNP is at rs9291547 and comprises an “A” allele, which is provided in SEQ ID NO: 255. In some embodiments, a single SNP is detected In some embodiments, more than one SNP is detected In some embodiments, methods further comprise administering to the subject a therapeutically effective amount of a therapeutic agent disclosed herein (e.g., agonist of ADYC, inhibitor of PDE4).

[0149] Methods disclosed herein comprise detecting a transcriptomic risk signature in a subject, which in some cases involves detecting a level of ANK3, which is predictive of a risk of developing a severe form of CD characteristic of CD3. In some cases, the transcriptomic risk signature is a downregulation of ANK3, as compared to a normal (e.g, non-diseased individual), or an individual with a less severe form of CD, such as CD1. In some cases, the transcriptomic risk signature is detected by detecting a level of gene expression product expressed from ANK3. In some cases, the transcriptomic risk signature is detected by detecting a presence of a SNP associated with the downregulation of ANK In some cases, the SNP is at rs10761532 and comprises an “A” allele, which is provided in SEQ ID NO: 194. In some cases, the SNP is at rs10821813 and comprises an “A” allele, which is provided in SEQ ID NO: 195. In some cases, the SNP is at rs1561852 and comprises a “C” allele, which is provided in SEQ ID NO: 196. In some cases, the SNP is at rs10994464 and comprises an “A” allele, which is provided in SEQ ID NO: 204. In some cases, the SNP is at rs993402 and comprises a “G” allele, which is provided in SEQ ID NO: 205. In some cases, the SNP is at rs10994467 and comprises an “A” allele, which is provided in SEQ ID NO: 206. In some cases, the SNP is at rs10821822 and comprises an “A” allele, which is provided in SEQ ID NO: 207. In some cases, the SNP is at rs1837949 and comprises a “G” allele, which is provided in SEQ ID NO: 208. In some cases, the SNP is at rs35597961 and comprises a “C” allele, which is provided in SEQ ID NO: 209. In some cases, the SNP is at rs10821830 and comprises a “G” allele, which is provided in SEQ ID NO: 210. In some cases, the SNP is at rs975262 and comprises an “A” allele, which is provided in SEQ ID NO: 211. In some cases, the SNP is at rs973067 and comprises an “A” allele, which is provided in SEQ ID NO: 212. In some cases, the SNP is at rs10509139 and comprises a “G” allele, which is provided in SEQ ID NO: 213. In some cases, the SNP is at rs1442539 and comprises an “A” allele, which is provided in SEQ ID NO: 214. In some cases, the SNP is at rs2197155 and comprises an “A” allele, which is provided in SEQ ID NO: 215. In some cases, the SNP is at rs7919914 and comprises a “G” allele, which is provided in SEQ ID NO: 216. In some cases, the SNP is at rs10994476 and comprises a “G” allele, which is provided in SEQ ID NO: 275. In some cases, the SNP is at rs35471473 and comprises an “A” allele, which is provided in SEQ ID NO: 243. In some cases, the SNP is at rs12785023 and comprises a “G” allele, which is provided in SEQ ID NO: 244. In some cases, the SNP is at rs12783716 and comprises a “G” allele, which is provided in SEQ ID NO: 245. In some cases, the SNP is at rs10821821 and comprises a “G” allele, which is provided in SEQ ID NO: 246. In some cases, the SNP is at rs10994441 and comprises a “G” allele, which is provided in SEQ ID NO: 284. In some cases, the SNP is at rs10994442 and comprises a “C” allele, which is provided in SEQ ID NO: 285. In some cases, the SNP is at rs10821814 and comprises a “T” allele, which is provided in SEQ ID NO: 286. In some cases, the SNP is at rs10994465 and comprises an “A” allele, which is provided in SEQ ID NO: 287. In some cases, the SNP is at rs12218617 and comprises a “T” allele, which is provided in SEQ ID NO: 288. In some cases, the SNP is at rs10509138 and comprises a “C” allele, which is provided in SEQ ID NO: 289. In some cases, the SNP is at rs61854518 and comprises an “A” allele, which is provided in SEQ ID NO: 290. In some cases, the SNP is at rs10821699 and comprises a “G” allele, which is provided in SEQ ID NO: 345. In some cases, the SNP is at rs7919274 and comprises a “G” allele, which is provided in SEQ ID NO: 352. In some cases, the SNP is at rs10761552 and comprises an “A” allele, which is provided in SEQ ID NO: 368. In some cases, the SNP is at rs17037425 and comprises a “G” allele, which is provided in SEQ ID NO: 369. In some cases, the SNP is at rs2893861 and comprises an “A” allele, which is provided in SEQ ID NO: 370. In some cases, the SNP is at rs1993939 and comprises a “C” allele, which is provided in SEQ ID NO: 371. In some cases, the SNP is at rs10821833 and comprises a “G” allele, which is provided in SEQ ID NO: 372. In some cases, the SNP is at rs1904418 and comprises a “G” allele, which is provided in SEQ ID NO: 373. In some cases, the SNP is at rs16915196 and comprises a “G” allele, which is provided in SEQ ID NO: 432. In some cases, the SNP is at rs61853514 and comprises an “A” allele, which is provided in SEQ ID NO: 433. In some cases, the SNP is at rs10994430 and comprises an “A” allele, which is provided in SEQ ID NO: 434. In some cases, the SNP is at rs16915231 and comprises an “A” allele, which is provided in SEQ ID NO: 435. In some cases, the SNP is at rs2028564 and comprises a “G” allele, which is provided in SEQ ID NO: 436. In some embodiments, a single SNP is detected In some embodiments, more than one SNP is detected. In some embodiments, methods further comprise administering to the subject a therapeutically effective amount of a therapeutic agent disclosed herein (e.g., agonist of ADYC, inhibitor of PDE4).

[0150] Methods disclosed herein comprise detecting a transcriptomic risk signature in a subject, which in some cases involves detecting a level of TRIM38, which is predictive of a risk of developing a severe form of CD characteristic of CD3. In some cases, the transcriptomic risk signature is a downregulation of TRIM38, as compared to a normal (e.g., non-diseased individual), or an individual with a less severe form of CD, such as CD1. In some cases, the transcriptomic risk signature is detected by detecting a level of gene expression product expressed from TRIM38. In some cases, the transcriptomic risk signature is detected by detecting a presence of a SNP associated with the downregulation of TRIM38. In some cases, the SNP is at rs13196552 and comprises a “G” allele, which is provided in SEQ ID NO: 237. In some cases, the SNP is at rs17587597 and comprises an “A” allele, which is provided in SEQ ID NO: 282. In some cases, the SNP is at rs17587226 and comprises an “A” allele, which is provided in SEQ ID NO: 301. In some embodiments, a single SNP is detected. In some embodiments, more than one SNP is detected. In some embodiments, methods further comprise administering to the subject a therapeutically effective amount of a therapeutic agent disclosed herein (e.g., agonist of ADYC, inhibitor of PDE4).

[0151] Methods disclosed herein comprise detecting a transcriptomic risk signature in a subject, which in some cases involves detecting a level of CYP4V2, which is predictive of a risk of developing a severe form of CD characteristic of CD3. In some cases, the transcriptomic risk signature is a downregulation of CYP4V2, as compared to a normal (e.g., non-diseased individual), or an individual with a less severe form of CD, such as CD1. In some cases, the transcriptomic risk signature is detected by detecting a level of gene expression product expressed from CYP4V2. In some cases, the transcriptomic risk signature is detected by detecting a presence of a SNP associated with the downregulation of CYP4V2. In some cases, the SNP is at rs2276917 and comprises an “A” allele, which is provided in SEQ ID NO: 200. In some cases, the SNP is at rs10013653 and comprises an “A” allele, which is provided in SEQ ID NO: 312. In some embodiments, a single SNP is detected In some embodiments, more than one SNP is detected In some embodiments, methods further comprise administering to the subject a therapeutically effective amount of a therapeutic agent disclosed herein (e.g., agonist of ADYC, inhibitor of PDE4).

[0152] Methods disclosed herein comprise detecting a transcriptomic risk signature in a subject, which in some cases involves detecting a level of VAMP3, which is predictive of a risk of developing a severe form of CD characteristic of CD3. In some cases, the transcriptomic risk signature is a downregulation of VAMP3, as compared to a normal (e.g, non-diseased individual), or an individual with a less severe form of CD, such as CD1. In some cases, the transcriptomic risk signature is detected by detecting a level of gene expression product expressed from VAMP3. In some cases, the transcriptomic risk signature is detected by detecting a presence of a SNP associated with the downregulation of VAMP3. In some cases, the SNP is at rs11582799 and comprises an “A” allele, which is provided in SEQ ID NO: 222. In some cases, the SNP is at rs111692854 and comprises an “A” allele, which is provided in SEQ ID NO: 223. In some cases, the SNP is at rs72632053 and comprises an “A” allele, which is provided in SEQ ID NO: 224. In some embodiments, a single SNP is detected. In some embodiments, more than one SNP is detected In some embodiments, methods further comprise administering to the subject a therapeutically effective amount of a therapeutic agent disclosed herein (e.g., agonist of ADYC, inhibitor of PDE4).

### G. Therapeutic Agents

[0153] Compositions, kits and methods disclosed herein may comprise a therapeutic agent or use thereof. The therapeutic agents disclosed herein are useful for the treatment of the inflammatory diseases or conditions, or symptoms of the inflammatory diseases or conditions disclosed herein. Non-limiting examples of classes of therapeutic agents used to treat the inflammatory diseases or conditions disclosed herein include anti-inflammatory mediators (e.g., small molecule and large molecule), steroids, and tumor necrosis factor (TNF) inhibitors. Non-limiting examples of therapeutic agents used to treat inflammatory bowel disease (IBD) include azathioprine, methotrexate, 6-mercaptopurine, prednisone, mesalazine, and budesonide. Targeted therapies, disclosed herein, are particular useful for the treatment of subjects selected on the basis of a presence of a risk genotype or transcriptomic risk signature provided herein. For example, in some embodiments, a subject is identified as a responder for a particular therapeutic agent disclosed herein, and subsequently treated with that therapeutic agent.

### Inhibitors of PDE4

[0154] Disclosed herein are therapeutic agents that are modulators of Phosphodiesterase 4 (PDE4) that are useful for the treatment of a disease or condition, or symptom of the disease or the condition, disclosed herein. There are roughly 20 PDE4 variants present in mammalian cells due to alternative splicing or the use of different transcriptional units. Each PDE4 member shares a highly conservative catalytic domain of about 320-350 amino acids with more than 80% sequence identity between the members of the four isotypes, PDE4A, PDE4B, PDE4C, and PDE4D. In some embodiments, the modulators of PDE4 disclosed herein are inhibitors of PDE4 expression or activity. An inhibitor of PDE4 expression or activity may be an antagonist, a partial antagonist, or an inverse agonist. The inhibitor of PDE4 may be a non-specific inhibitor of PDE4 isotypes, or a specific inhibitor to one of the four isotypes disclosed herein (e.g, PDE4A, PDE4B, PDE4C, and PDE4D). An “inhibitor of PDE4 expression or activity” as used herein means a inhibitor of the expression or the activity of one or more of the isotypes described herein.

[0155] In some cases, the inhibitor of PDE4 expression or activity disclosed herein is effective to target a region of the PDE4C protein or mRNA PDE4C is encoded on Chromosome 19 (NG 029629.1). The messenger RNA (mRNA) sequence for PDE4C isoform 1 is provided in NM_000923.5, which encodes PDE4C protein isoform 1 provided in NP_000914.2, SEQ ID NO: 440. The mRNA sequence for PDE4C isoform 2 is provided in NM_001098819.3, which encodes PDE4C protein isoform 2 provided in NP_001092289.1, which differs in the 5′ UTR, lacks a portion of the 5′ coding region, and initiates translation at a downstream start codon, compared to isoform 1. The encoded isoform 2 has a shorter N-terminus compared to isoform 1. The mRNA for PDE4C isoform 3 is provided in NM_001098818.4, which encodes PDE4C protein isoform 3 provided in NP_001092288.1, which 0differs in the 5′ UTR, lacks a portion of the 5′ coding region, and initiates translation at an alternate start codon, compared to isoform 1. The encoded isoform has a shorter, distinct N-terminus compared to isoform 1.

[0156] In some embodiments, the inhibitor of PDE4 expression or activity comprises an allosteric modulator of PDE4. An allosteric modulator of PDE4 may indirectly influence the effects PDE4 and binding partners of PDE4. The inhibitor of PDE4 expression or activity may be a direct inhibitor or indirect inhibitor. Non-limiting examples of an inhibitor of PDE4 expression include RNA to protein translation inhibitors, antisense oligonucleotides targeting the PDE4A, PDE4B, PDE4C, and PDE4D, or homolog thereof, mRNA (such as miRNAs, or siRNA), epigenetic editing (such as post-translational modifications of histone tails and/or DNA molecules). Non-limiting examples of an inhibitor of PDE4 activity include antagonists to the PDE4 antigen, and antagonists to gene expression products involved in PDE4 mediated disease. Inhibitors of PDE4 disclosed herein, may include, but are not limited to, a small molecule. The small molecule may be a small molecule that binds to PDE4 or binding partners to PDE4. The small molecule may be a selective inhibitor of an isoform of PDE4. Non-limiting examples of PDE4 inhibitors indude theophylline, rolipram, prostacyclin, Apremilast (Otexlak), Cilomilast Roflumilast (Daliresp®), HT-0712, BPN14770, Crisaborole, MK0952, CHF6001, ASP9831 (ASTER), GSK356278, OPA15406, CC-10004, RPL554, Hemay500, GSK256006, CC-11050, GW842470N and BLX-028914. In some cases, the small molecule inhibitor of PDE4 is an inhibitor of PDE4C specifically.

[0157] Inhibitors of PDE4 disclosed herein, may include, but are not limited to, an anti-PDE4 antibody, an antigen-binding fragment thereof. The anti-PDE4 antibody may be monoclonal or polyclonal. The anti-PDE4 antibody may be humanized or chimeric. The anti-PDE4 antibody may be a fusion protein. The anti-PDE4 antibody may be a blocking anti-PDE4 antibody. A blocking antibody blocks binding between two proteins, e.g., a ligand and its receptor. In a non-limiting example, the PDE4 blocking antibody binds to a binding partner of PDE4. In another example, the PDE4 blocking antibody prevents PDE4 from hydrolyzing cyclic adenosine monophosphate (cAMP). In some cases, the PDE4 antibody is an anti-PDE4C antibody that specifically binds to PDE4C.

[0158] Non-limiting methods for determining whether an anti-PDE4 antibody binds to the same region of a reference antibody are known in the art. An exemplary method comprises a competition assay. For instance, the method comprises determining whether a reference antibody can compete with binding between the reference antibody and the PDE4 protein or portion thereof, or determining whether the reference antibody can compete with binding between the reference antibody and the PDE4 protein or portion thereof. Exemplary methods include use of surface plasmon resonance to evaluate whether an anti-PDE4 antibody can compete with the binding between PDE4 and another anti-PDE4 antibody. In some cases, surface plasmon resonance is utilized in the competition assay.

### Agonists of ADCY7

[0159] Disclosed herein are therapeutic agents that are modulators of Adenylate Cyclase 7 (ADCY7) that are useful for the treatment of a disease or condition, or symptom of the disease or the condition, disclosed herein. The modulator of ADCY7, in some cases, is an agonist, partial agonist. The inhibitor of ADCY7 may be a non-specific inhibitor of ADCY7, or a specific inhibitor to ADCY7.

[0160] In some cases, the agonists of ADCY7 are effective to specifically target a region of the ADCY7 protein or mRNA ADCY7, and nucleic acids encoding ADCY7 (Entrez ID 113), is located on human chromosome 16 at 16q12.1. The amino acid sequence for ADCY7 isoform 1 (NP_001105.1) is provided in SEQ ID NO: 452, which is encoded by mRNA transcript variant 1 (NM_001114.4). An additional ADCY7 protein isoform is provided in SEQ ID NOS: 453, which is encoded by transcript variant 2 (NM_001286057.1).

[0161] Agonists of ADCY7 disclosed herein are effective to increase the expression or activity of ADCY7 in a subject. In some embodiments, the agonist of ADCY7 comprises an allosteric modulator of ADCY7. An allosteric modulator of ADCY7 may indirectly influence the effects ADCY7 and binding partners of ADCY7. Non-limiting examples of an agonist of ADCY7 expression include RNA to protein ADCY7 translation agonists, antisense oligonucleotides targeting the ADCY7, or homolog thereof, mRNA (such as miRNAs, or siRNA), epigenetic editing (such as post-translational modifications of histone tails and/or DNA molecules). Non-limiting examples of an agonist of ADCY7 activity include antagonists to the ADCY7 antigen, and antagonists to gene expression products involved in ADCY7 mediated disease. Agonists as disclosed herein, may include, but are not limited to, an ADCY7 antibody, an ADCY7-binding antibody fragment, recombinant polypeptide, or a small molecule. The small molecule may be a small molecule that binds to ADCY7 or binding partners to ADCY7. The ADCY7 antibody may be monoclonal or polyclonal. The ADCY7 antibody may be humanized or chimeric. The ADCY7 antibody may be a fusion protein. The ADCY7 antibody may be a blocking ADCY7 antibody. A blocking antibody blocks binding between two proteins, e.g., a ligand and its receptor. In a non-limiting example, the ADCY7 blocking antibody binds to a binding partner of ADCY7. In some cases, the ADCY7 antibody is an ADCY7 antibody that specifically binds to ADCY7. In some cases the ADCY7 is naturally occurring. In some embodiments, the ADCY7 agonists comprise one or more small molecule compounds that are pan-activators of adenylyl cyclases (ACs). Non-limiting examples of ADCY7 agonists that are pan-activators of ACs include forskolin, colforsin daropate, and analogs thereof.

[0162] Disclosed herein, in some embodiments are methods of treating a disease or condition in a subject by administering a therapeutically effective amount of an allosteric modulator of ADCY7 activity or expression to the subject, thereby decreasing or increasing ADCY7 expression or activity. In some embodiments, the allosteric modulator of ADCY7 is a positive allosteric modulator (PAM) effective to enhance or potentiate a ligand of ADCY7. In some embodiments, the allosteric modulator of ADCY7 is a negative allosteric modulator (NAM) effective to reduce the effect of a primary ligand of ADCY7. In some embodiments, the allosteric modulator binds to a non-orthosteric binding site of ADCY7. In some embodiments, the modulator of ADCY7 affects a conformation of the orthosteric binding site of ADCY7 effective decrease or increase activity of ADCY7. In some embodiments, the modulator of ADCY7 is effective to increase or decrease a rate of catalysis of cyclic adenosine monophosphate (cAMP) from adenosine triphosphate (ATP) by ADCY7. In some embodiments, the modulator of ADCY7 is effective to reduce or enhance the inhibition of ADCY7 activity by calcium. Non-limiting examples of ligands that activate ADCY7 include G protein alpha subunit, G protein beta and gamma subunit complex, G Protein Subunit Alpha 13 (GNA13), G Protein Subunit Alpha 12 (GNA12), and ethanol. A non-limiting example of a ligand that inhibits ADCY7 includes lithium.

### RIPK2 Modulators

[0163] Disclosed herein, in some embodiments, are therapeutic agents useful for the treatment of a disease or condition, or symptom of the disease or condition, disclosed herein. Disclosed herein, in some embodiments, are modulators of Receptor Interacting Serine/Threonine Kinase 2 (RIPK2) activity or expression. In some embodiments, a modulator of RIPK2 activity or expression comprises an antagonist or a partial antagonist of RIPK2. In some embodiments, the RIPK2 antagonist or partial antagonist comprises an antibody or antigen-binding fragment, or a small molecule.

[0164] In some embodiments, the RIPK2 antagonist or partial antagonist comprises a type I RIPK2 inhibitor effective to bind to the ATP binding pocket of an active conformation of the RIPK2 kinase domain. In some embodiments, the RIPK2 antagonist or partial antagonist comprises a type I_{1/2} RIPK2 inhibitor effective to bind to the ATP binding pocket of an inactive conformation of the RIPK2 kinase domain without displacing the RIPK2 kinase activation segment. In some embodiments, the RIPK2 antagonist or partial antagonist comprises a type II RIPK2 inhibitor effective to displace a RIPK2 kinase activation segment. In some embodiments, the RIPK2 antagonist or partial antagonist comprises a type III RIPK2 inhibitor effective to bind an allosteric site of RIPK2 located in the cleft between the small and large lobes adjacent to the ATP binding pocket. In some embodiments, the RIPK2 antagonist or partial antagonist comprises a type IV RIPK2 inhibitor effective to bind an allosteric site of RIPK2 located outside of the deft and the phosphoacceptor region. In some embodiments, the RIPK2 antagonist or partial antagonist comprises a type V RIPK2 inhibitor effective to span two regions of the RIPK2 kinase domain. In some embodiments, the RIPK2 antagonist or partial antagonist comprises a type VI RIPK2 inhibitor effective to form a covalent adduct with RIPK2. In some embodiments, the RIPK2 antagonist or partial antagonist comprises a RIPK2 inhibitor effective to inhibit RIPK2 ubiquitination. In some embodiments, the RIPK2 antagonist or partial antagonist comprises a RIPK2 inhibitor effective to inhibit RIPK2 autophosphorylation. In some embodiments, the RIPK2 antagonist or partial antagonist comprises a RIPK2 inhibitor effective to block NOD-dependent tumor necrosis factor production without affecting lipopolysaccharide-dependent pathways. In some embodiments, the RIPK2 antagonist or partial antagonist comprises ponatinib, sorafenib, regorafenib, gefitinib, or erlotinib. In some embodiments, the RIPK2 antagonist or parital antagonist comprises GSK2983559, GSK583, Inhibitor 7, Biaryl Urea, CSR35, CSLP37, CSLP43, RIPK2 inhibitor 1, CS6, PP2, WEHI-345, SB203580, OD36, OD38, RIPK2-IN-8, RIPK2-IN-1, or RIPK2-IN-2, or any combination thereof.

[0165] Disclosed herein, in some embodiments, are antagonists or partial antagonists of RIPK2 having a structure of Formula (I) or a pharmaceutically acceptable salt or isotopic variant thereof:

[chemical structure]

[0166] wherein
[0167] Ring A is C₃₋₈cycloalkyl, C₂₋₉heterocycloalkyl, C₂₋₉heteroaryl, or 6- to 10-membered aryl;
[0168] X is N or CR⁴;
[0169] R¹ and R² are independently —H, halogen, —OH, —OR⁵, —CN, —N(R⁶)₂, —NR⁶C(O)R⁵, —C(O)OR⁵, —C(O)N(R⁶)₂, C₁₋₆alkyl, C₂₋₆alkenyl, C₂₋₆alkynyl, C₃₋₈cycloalkyl, —C₁₋₆alkyl-OH, —C₁₋₆alkyl-OR⁵, —C₁₋₆alkyl-N(R⁶)₂, —O—C₁₋₆alkyl, —O—C₁₋₆alkyl-OH, —O—C₁₋₆alkyl-OR⁵, —O—C₁₋₆alkyl-N(R⁶)₂, or —S(═O)₂R⁵;
[0170] each R³ is independently —H, halogen, —NO₂, —CN, —OH, —OR⁵, —SR⁵, —N(R⁶)₂, —S(O)R⁵, —S(═O)₂R⁵, —NR⁶S(═O)₂R⁵, —S(═O)₂N(R⁶)₂, —C(O)R⁵, —C(O)OR⁵, —OC(O)R⁵, —C(O)N(R⁶)₂, —OC(O)N(R⁶)₂, —NR⁶C(O)N(R⁶)₂, —NR⁶C(O)R⁵, —NR⁶C(O)OR⁵, C₁₋₆alkyl, C₂₋₆alkenyl, C₂₋₆alkynyl, C₁₋₆haloalkyl, C₁₋₆heteroalkyl, —O—C₁₋₆alkyl, C₃₋₈cycloalkyl, C₂₋₉heterocycloalkyl, C₂₋₉heteroaryl, 6- to 10-membered aryl, or —O-phenyl, wherein each alkyl, haloalkyl, heteroalkyl, cycloalkyl, heterocycloalkyl, aryl, and heteroaryl is optionally substituted with one or more R⁷;
[0171] R⁴ is —H, halogen, C₁₋₆alkyl, C₂₋₆alkenyl, C₂₋₆alkynyl, C₁₋₆haloalkyl, C₃₋₈cycloalkyl, —C₁₋₆alkyl-C₃₋₈cycloalkyl, phenyl, —C₁₋₆alkyl-phenyl, C₂₋₉heterocycloalkyl, —C₁₋₆alkyl-C₂₋₉heterocycloalkyl, C₂₋₉heteroaryl, or —C₁₋₆alkyl-C₂₋₉heteroaryl, wherein the alkyl, haloalkyl, cycloalkyl, phenyl, heteroaryl, and heterocycloalkyl are optionally substituted;
[0172] each R⁵ is independently —H, C₁₋₆alkyl, C₂₋₆alkenyl, C₂₋₆alkynyl, C₁₋₆haloalkyl, C₃₋₈cycloalkyl, —C₁₋₆alkyl-C₃₋₈cycloalkyl, phenyl, —C₁₋₆alkyl-phenyl, C₂₋₉heterocycloalkyl, —C₁₋₆alkyl-C₂₋₉heterocycloalkyl, C₂₋₉heteroaryl, or —C₁₋₆alkyl-C₂₋₉heteroaryl;
[0173] each R⁶ is independently —H, C₁₋₆alkyl, C₂₋₆alkenyl, C₂₋₆alkynyl, C₁₋₆haloalkyl, C₃₋₈cycloalkyl, —C₁₋₆alkyl-C₃₋₈cycloalkyl, phenyl, —C₁₋₆alkyl-phenyl, or C₂₋₉heteroaryl; or
   [0174] two R⁶ substituents are taken together with the nitrogen atom to which they are attached to form a 5- or 6-membered heterocycle; and
[0175] R⁷ is —H, halogen, C₁₋₆alkyl, C₂₋₆alkenyl, C₂₋₆alkynyl, C₁₋₆haloalkyl, C₃₋₈cycloalkyl, —C₁₋₆alkyl-C₃₋₈cycloalkyl, phenyl, —C₁₋₆alkyl-phenyl, C₂₋₉heterocycloalkyl, —C₁₋₆alkyl-C₂₋₉heterocycloalkyl, C₂₋₉heteroaryl, or —C₁₋₆alkyl-C₂₋₉heteroaryl; and
[0176] n is 0, 1, 2, 3, 4, or 5.

[0177] In some embodiments of a compound of Formula (I), Ring A is C₃₋₈cycloalkyl, C₂₋₉-heterocycloalkyl, C₂₋₉heteroaryl, or 6- to 10-membered aryl. In some embodiments of a compound of Formula (I), Ring A is C₃₋₇heteroaryl or 6-membered aryl. In some embodiments of a compound of Formula (I), Ring A is pyrrazolyl. In some embodiments of a compound of Formula (I), Ring A is C₇heteroaryl. In some embodiments of a compound of Formula (I), Ring A is phenyl.

[0178] In some embodiments, for a compound of Formula (I), X is N or CR⁴. In some embodiments, for a compound of Formula (I), X is N or CH. In some embodiments, for a compound of Formula (I), X is N. In some embodiments, for a compound of Formula (I), X is CH.

[0179] In some embodiments, for a compound of Formula (I), R¹ is —H, halogen, —OH, —CN, —N(R⁶)₂, —NR⁶C(O)R⁵, —C(O)OR⁵, —C(O)N(R⁶)₂, C₁₋₆alkyl, C₂₋₆alkenyl, C₂₋₆alkynyl, C₃₋₈cycloalkyl, —C₁₋₆alkyl-OH, —C₁₋₆alkyl-OR⁵, —C₁₋₆alkyl-N(R⁶)₂, —O—C₁₋₆alkyl, —O—C₁₋₆alkyl-OH, —O—C₁₋₆alkyl-OR⁵, —O—C₁₋₆alkyl-N(R⁶)₂, or —S(═O)₂R⁵. In some embodiments, for a compound of Formula (I), R¹ is C₁₋₆alkyl, C₂₋₆alkenyl, —C₁₋₆alkyl-OH, —C₁₋₆alkyl-OR⁵, —C₁₋₆alkyl-N(R⁶)₂, —O—C₁₋₆alkyl, —O—C₁₋₆alkyl-OH, —O—C₁₋₆alkyl-OR⁵, —O—C₁₋₆alkyl-N(R⁶)₂, or —S(═O)₂R⁵. In some embodiments, for a compound of Formula (I), R¹ is —O—C₁₋₆alkyl, —O—C₁₋₆alkyl-OR⁵, —O—C₁₋₆alkyl-N(R⁶)₂, or —S(═O)₂R⁵. In some embodiments, for a compound of Formula (I), R¹ is —O—C₁₋₆alkyl. In some embodiments, for a compound of Formula (I), R¹ is —OCH₃. In some embodiments, for a compound of Formula (I), R¹ is —O—C₁₋₆alkyl-OR⁵. In some embodiments, for a compound of Formula (I), R¹ is —OCH₂CH₂OCH₃. In some embodiments, for a compound of Formula (I), R¹ is —O—C₁₋₆alkyl-N(R⁶)₂. In some embodiments, for a compound of Formula (I), R¹ is —O CH₂CH₂CH₂morpholine. In some embodiments, for a compound of Formula (I), R¹ is —S(═O)₂R⁵. In some embodiments, for a compound of Formula (I), R¹ is —S(═O)₂tert-butyl.

[0180] In some embodiments, for a compound of Formula (I), R² is —H, halogen, —OH, —CN, —N(R⁶)₂, —NR⁶C(O)R⁵, —C(O)OR⁵, —C(O)N(R⁶)₂, C₁₋₆alkyl, C₂₋₆alkenyl, C₂₋₆alkynyl, C₃₋₈cycloalkyl, —C₁₋₆alkyl-OH, —C₁₋₆alkyl-OR⁵, —C₁₋₆alkyl-N(R⁶)₂, —O—C₁₋₆alkyl, —O—C₁₋₆alkyl-OH, —O—C₁₋₆alkyl-OR⁵, —O—C₁₋₆ alkyl-N(R⁶)₂, or —S(═O)₂R⁵. In some embodiments, for a compound of Formula (I), R² is —H, —O—C₁₋₆alkyl, —O—C₁₋₆alkyl-OR⁵, or —O—C₁₋₆alkyl-OH In some embodiments, for a compound of Formula (I), R² is —H In some embodiments, for a compound of Formula (I), R² is —O—C₁₋₆alkyl. In some embodiments, for a compound of Formula (I), R² is —OCH₃. In some embodiments, for a compound of Formula (I), R² is —O—C₁₋₆alkyl-OR⁵. In some embodiments, for a compound of Formula (I), R² is —OCH₂CH₂OCH₃. In some embodiments, for a compound of Formula (I), R² is —O—C₁₋₆alkyl-OH. In some embodiments, for a compound of Formula (I), R² is —OCH₂CH₂OH.

[0181] In some embodiments, for a compound of Formula (I), R³ is —H, halogen, —NO₂, —CN, —OH, —OR⁵, —SR⁵, —N(R⁶)₂, —S(O)R⁵, —S(═O)₂R⁵, —NR⁶S(═O)₂R⁵, —S(═O)₂N(R⁶)₂, —C(O)R⁵, —C(O)OR⁵, —OC(O)R⁵, —C(O)N(R⁶)₂, —OC(O)N(R⁶)₂, —NR⁶C(O)N(R⁶)₂, —NR⁶C(O)R⁵, —NR⁶C(O)OR⁵, C₁₋₆alkyl, C₂₋₆alkenyl, C₂₋₆alkynyl, C₁₋₆haloalkyl, C₁₋₆heteroalkyl, —O—C₁₋₆alkyl, C₃₋₈cycloalkyl, C₂₋₉heterocycloalkyl, C₂₋₉heteroaryl, 6- to 10-membered aryl, or —O-phenyl, wherein each alkyl, haloalkyl, heteroalkyl, cycloalkyl, heterocycloalkyl, aryl, and heteroaryl is optionally substituted with one or more R⁷. In some embodiments, for a compound of Formula (I), R³ is —H, halogen, C₁₋₆alkyl, C₂₋₆alkynyl, or —O-phenyl. In some embodiments, for a compound of Formula (I), R³ is —H. In some embodiments, for a compound of Formula (I), R³ is —Cl. In some embodiments, for a compound of Formula (I), R³ is —F. In some embodiments, for a compound of Formula (I), R³ is —CH₃. In some embodiments, for a compound of Formula (I), R³ is —CCH. In some embodiments, for a compound of Formula (I), R³ is —O-phenyl.

[0182] In some embodiments, for a compound of Formula (I), n is 0, 1, 2, or 3. In some embodiments, for a compound of Formula (I), n is 1, 2, or 3. In some embodiments, for a compound of Formula (I), n is 1 or 2. In some embodiments, for a compound of Formula (I), n is 0. In some embodiments, for a compound of Formula (I), n is 1. In some embodiments, for a compound of Formula (I), n is 2. In some embodiments, for a compound of Formula (I), n is 3.

[0183] Disclosed herein, in some embodiments, are antagonists or partial antagonists of RIPK2 having a structure of Formula (Ia) or a pharmaceutically acceptable salt or isotopic variant thereof:

[chemical structure]

[0184] wherein;
[0185] each R³ is independently —H, halogen, —C≡CH, or —O-aryl; and
[0186] each R⁵ is independently C₁₋₆ alkyl, —C₁₋₆alkyl-O—C₁₋₆alkyl, or —C₁₋₆alkyl-heterocycloalkyl.

[0187] Disclosed herein, in some embodiments, are antagonists or partial antagonists of RIPK2 having a structure of Formula (Ia) or a pharmaceutically acceptable salt or isotopic variant thereof:

[chemical structure]

[0188] wherein;
[0189] each R³ is independently —H, —Cl, —F, —C≡CH, or —O-phenyl; and
[0190] each R⁵ is independently —CH₃, —CH₂CH₂OCH₃, or —CH₂CH₂CH₂morpholine.

[0191] Disclosed herein, in some embodiments, are antagonists or partial antagonists of RIPK2 having a structure of Formula (Ib) or a pharmaceutically acceptable salt or isotopic variant thereof:

[chemical structure]

[0192] wherein;
[0193] Ring A is C₃₋₇heteroaryl;
[0194] X is N or CH;
[0195] R² is —H, —OC₁₋₆alkyl, or —O—C₁₋₆alkyl-OH;
[0196] each R³ is independently —H, —C₁₋₆alkyl, or halogen; and
[0197] n is 0, 1, or 2.

[0198] Disclosed herein, in some embodiments, are antagonists or partial antagonists of RIPK2 having a structure of Formula (Ib) or a pharmaceutically acceptable salt or isotopic variant thereof:

[chemical structure]

[0199] wherein;
[0200] Ring A is C₃₋₇heteroaryl;
[0201] X is N or CH;
[0202] R² is —H, —OCH₃, or —OCH₂CH₂OH;
[0203] each R³ is independently —H, —CH₃, or —F; and
[0204] n is 0, 1, or 2.

[0205] In some embodiments a compound of Formula (I) or a pharmaceutically acceptable salt or isotopic variant thereof has the structure of:

[chemical structure]

[0206] Disclosed herein, in some embodiments, are antagonists or partial antagonists of RIPK2 having a structure of Formula (II) or a pharmaceutically acceptable salt or isotopic variant thereof:

[chemical structure]

[0207] wherein
[0208] Rings A and B are independently C₃₋₈cycloalkyl, C₂₋₉heterocycloalkyl, C₂₋₉heteroaryl, or 6- to 10-membered aryl;
[0209] X¹, X², and X³ are independently N or CR⁴;
[0210] Y¹ and Y² are independently a bond, —O—, —S—, —C(R⁵)₂, —NR⁶—, —NR⁶C(O)—, —C(O)NR⁶—, or —NR⁶C(O)NR⁶—;
[0211] each R¹ and R² is independently —H, halogen, —NO₂, —CN, —OH, —OR⁵, —SR⁵, —N(R⁶)₂, —S(O)R⁵, —S(═O)₂R⁵, —NR⁶S(═O)₂R⁵, —S(═O)₂N(R⁶)₂, —SCH₂C(O)OR⁵, —C(O)R⁵, —C(O)OR⁵, —OC(O)R⁵, —C(O)N(R⁶)₂, —OC(O)N(R⁶)₂, —NR⁶C(O)N(R⁶)₂, —NR⁶C(O)R⁵, —NR⁶C(O)OR⁵, C₁₋₆alkyl, C₂₋₆alkenyl, C₂₋₆alkynyl, C₁₋₆haloalkyl, C₁₋₆heteroalkyl, —O—C₁₋₆alkyl, C₃₋₈cycloalkyl, C₂₋₉heterocycloalkyl, C₂₋₉heteroaryl, 6- to 10-membered aryl, or —O-phenyl, wherein each alkyl, haloalkyl, heteroalkyl, cycloalkyl, heterocycloalkyl, aryl, and heteroaryl is optionally substituted with one or more R⁷;
[0212] each R⁴ is independently —H, halogen, —N(R⁶)₂, —NO₂, C₁₋₆alkyl, C₂₋₆alkenyl, C₂₋₆alkynyl, C₁₋₆haloalkyl, C₃₋₈cycloalkyl, —C₁₋₆alkyl-C₃₋₈cycloalkyl, phenyl, —C₁₋₆alkyl-phenyl, C₂₋₉heterocycloalkyl, —C₁₋₆alkyl-C₂₋₉heterocycloalkyl, C₂₋₉heteroaryl, or —C₁₋₆alkyl-C₂₋₉heteroaryl, wherein the alkyl, haloalkyl, cycloalkyl, phenyl, heteroaryl, and heterocycloalkyl are optionally substituted;
[0213] each R⁵ is independently —H, C₁₋₆alkyl, C₂₋₆alkenyl, C₂₋₆alkynyl, C₁₋₆haloalkyl, C₃₋₈cycloalkyl, —C₁₋₆alkyl-C₃₋₈cycloalkyl, phenyl, —C₁₋₆alkyl-phenyl, C₂₋₉heterocycloalkyl, —C₁₋₆alkyl-C₂₋₉heterocycloalkyl, C₂₋₉heteroaryl, or —C₁₋₆alkyl-C₂₋₉heteroaryl;
[0214] each R⁶ is independently —H, C₁₋₆alkyl, C₂₋₆alkenyl, C₂₋₆alkynyl, C₁₋₆haloalkyl, C₃₋₈cycloalkyl, —C₁₋₆alkyl-C₃₋₈cycloalkyl, phenyl, —C₁₋₆alkyl-phenyl, or C₂₋₉heteroaryl; or two R⁶ are taken together with the nitrogen atom to which they are attached to form a 5- or 6-membered heterocycle; and
[0215] R⁷ is —H, halogen, C₁₋₆alkyl, C₂₋₆alkenyl, C₂₋₆alkynyl, C₁₋₆haloalkyl, C₃₋₈cycloalkyl, —C₁₋₆alkyl-C₃₋₈cycloalkyl, phenyl, —C₁₋₆alkyl-phenyl, C₂₋₉heterocycloalkyl, —C₁₋₆alkyl-C₂₋₉heterocycloalkyl, C₂₋₉heteroaryl, or —C₁₋₆alkyl-C₂₋₉heteroaryl; and m and n are each independently 0, 1, 2, 3, 4, or 5.

[0216] In some embodiments, for a compound of Formula (II), Rings A and B are independently C₃₋₈cycloalkyl, C₂₋₉heterocycloalkyl, C₂₋₉heteroaryl, or 6- to 10-membered aryl. In some embodiments, for a compound of Formula (II), Rings A and B are independently C₂₋₉heteroaryl or 6- to 10-membered aryl. In some embodiments, for a compound of Formula (II), Ring A is phenyl. In some embodiments, for a compound of Formula (II), Ring A is pyridyl. In some embodiments, for a compound of Formula (II), Ring A is furanyl. In some embodiments, for a compound of Formula (II), Ring B is phenyl. In some embodiments, for a compound of Formula (II), Ring B is pyrrazolyl. In some embodiments, for a compound of Formula (II), Ring B is pyridyl. In some embodiments, for a compound of Formula (II), Ring B is isoxazolyl. In some embodiments, for a compound of Formula (II), Ring A is phenyl and Ring B is pyrrazolyl. In some embodiments, for a compound of Formula (II), Ring A is phenyl and Ring B is phenyl. In some embodiments, for a compound of Formula (II), Ring A is phenyl and Ring B is pyridyl. In some embodiments, for a compound of Formula (II), Ring A is pyridyl and Ring B is phenyl. In some embodiments, for a compound of Formula (II), Ring A is pyridyl and Ring B is isoxazolyl. In some embodiments, for a compound of Formula (II), Ring A is isoxazoylyl and Ring B is pyridyl. In some embodiments, for a compound of Formula (II), Ring A is furanyl and Ring B is phenyl.

[0217] In some embodiments, for a compound of Formula (II), X¹, X², and X³ are independently N or CR⁴. In some embodiments, for a compound of Formula (II), X¹ is CH. In some embodiments, for a compound of Formula (II), X¹ is CF. In some embodiments, for a compound of Formula (II), X¹ is CCH₃. In some embodiments, for a compound of Formula (II), X¹ is CNH₂. In some embodiments, for a compound of Formula (II), X¹ is N. In some embodiments, for a compound of Formula (II), X² is CH. In some embodiments, for a compound of Formula (II), X² is CF. In some embodiments, for a compound of Formula (II), X² is N. In some embodiments, for a compound of Formula (II), X² is C—N-methylpyrazine. In some embodiments, for a compound of Formula (II), X³ is CH. In some embodiments, for a compound of Formula (II), X³ is N. In some embodiments, for a compound of Formula (II), X¹ is CF and X² and X³ are CH In some embodiments, for a compound of Formula (II), X² is CF and X¹ and X³ are CH In some embodiments, for a compound of Formula (II), X¹, X², and X³ are CH. In some embodiments, for a compound of Formula (II), X¹ is CCH₃ and X² and X³ are CH. In some embodiments, for a compound of Formula (II), X¹ is CNH₂, X² is N, and X³ is CH In some embodiments, for a compound of Formula (II), X² is C—N-methylpyrazine and X¹ and X³ are N.

[0218] In some embodiments, for a compound of Formula (II), Y¹ and Y² are independently a bond, —O—, —S—, —C(R⁵)₂, —NR⁶—, —NR⁶C(O)—, —C(O)NR⁶—, or —NR⁶C(O)NR⁶—. In some embodiments, for a compound of Formula (II), Y¹ is —NR⁶C(O)—. In some embodiments, for a compound of Formula (II), Y¹ is —O—. In some embodiments, for a compound of Formula (II), Y¹ is —NR⁶C(O)NR⁶—. In some embodiments, for a compound of Formula (II), Y¹ is a bond. In some embodiments, for a compound of Formula (II), Y¹ is —NR⁶—. In some embodiments, for a compound of Formula (II), Y² is —NR⁶C(O)—. In some embodiments, for a compound of Formula (II), Y² is —O—. In some embodiments, for a compound of Formula (II), Y² is —NR⁶C(O)NR⁶—. In some embodiments, for a compound of Formula (II), Y² is a bond. In some embodiments, for a compound of Formula (II), Y¹ is —S—. In some embodiments, for a compound of Formula (II), Y¹ and Y² are —NHC(O)—. In some embodiments, for a compound of Formula (II), Y¹ is —O— and Y² is —NHC(O)NH—. In some embodiments, for a compound of Formula (II), Y¹ is —NHC(O)NH— and Y² is —O—. In some embodiments, for a compound of Formula (II), Y¹ and Y² are bonds. In some embodiments, for a compound of Formula (II), Y¹ is —NH— and Y² is —S—.

[0219] In some embodiments, for a compound of Formula (II), R¹ is —H, halogen, —NO₂, —CN, —OH, —OR⁵, —SR⁵, —N(R⁶)₂, —S(O)R⁵, —S(═O)₂R⁵, —NR⁶S(═O)₂R⁵, —S(═O)₂N(R⁶)₂, —C(O)R⁵, —C(O)OR⁵, —OC(O)R⁵, —C(O)N(R⁶)₂, —OC(O)N(R⁶)₂, —NR⁶C(O)N(R⁶)₂, —NR⁶C(O)R⁵, —NR⁶C(O)OR⁵, C₁₋₆alkyl, C₂₋₆alkenyl, C₂₋₆alkynyl, C₁₋₆haloalkyl, C₁₋₆heteroalkyl, —O—C₁₋₆alkyl, C₃₋₈cycloalkyl, C₂₋₉heterocycloalkyl, C₂₋₉heteroaryl, 6- to 10-membered aryl, or —O-phenyl, wherein each alkyl, haloalkyl, heteroalkyl, cycloalkyl, heterocycloalkyl, aryl, and heteroaryl is optionally substituted with one or more R⁷. In some embodiments, for a compound of Formula (II), R¹ is —Cl. In some embodiments, for a compound of Formula (II), R¹ is —F. In some embodiments, for a compound of Formula (II), R¹ is —C(O)NHCH₃. In some embodiments, for a compound of Formula (II), R¹ is 2-methylpyrrazolyl. In some embodiments, for a compound of Formula (II), R¹ is N-methylimidazolyl. In some embodiments, for a compound of Formula (II), R¹ is tert-butyl. In some embodiments, for a compound of Formula (II), R¹ is —NHC(O)cyclopropyl. In some embodiments, for a compound of Formula (II), R¹ is —SCH₂C(O)OH In some embodiments, for a compound of Formula (II), R¹ is —OCH₃. In some embodiments, for a compound of Formula (II), R¹ is —NHS(═O)₂CH₂CH₂CH₃.

[0220] In some embodiments, for a compound of Formula (II), R² is —H, halogen, —NO₂, —CN, —OH, —OR⁵, —SR⁵, —N(R⁶)₂, —S(O)R⁵, —S(═O)₂R⁵, —NR⁶S(═O)₂R⁵, —S(═O)₂N(R⁶)₂, —C(O)R⁵, —C(O)OR⁵, —OC(O)R⁵, —C(O)N(R⁶)₂, —OC(O)N(R⁶)₂, —NR⁶C(O)N(R⁶)₂, —NR⁶C(O)R⁵, —NR⁶C(O)OR⁵, C₁₋₆alkyl, C₂₋₆alkenyl, C₂₋₆alkynyl, C₁₋₆haloalkyl, C₁₋₆heteroalkyl, —O—C₁₋₆alkyl, C₃₋₈cycloalkyl, C₂₋₉heterocycloalkyl, C₂₋₉heteroaryl, 6- to 10-membered aryl, or —O-phenyl, wherein each alkyl, haloalkyl, heteroalkyl, cycloalkyl, heterocycloalkyl, aryl, and heteroaryl is optionally substituted with one or more R⁷. In some embodiments, for a compound of Formula (II), R² is —Cl. In some embodiments, for a compound of Formula (II), R² is —F. In some embodiments, for a compound of Formula (II), R² is —C(O)NHCH₃. In some embodiments, for a compound of Formula (II), R¹ is 2-methylpyrrazolyl. In some embodiments, for a compound of Formula (II), R¹ is N-methylimidazolyl. In some embodiments, for a compound of Formula (II), R² is —CH₂-(2-iso-propylimidazole). In some embodiments, for a compound of Formula (II), R² is tert-butyl. In some embodiments, for a compound of Formula (II), R² is —CH₃. In some embodiments, for a compound of Formula (II), R² is —C(O)NHCH₃. In some embodiments, for a compound of Formula (II), R² is pyrazinyl.

[0221] In some embodiments, for a compound of Formula (II), m is 1 or 2. In some embodiments, for a compound of Formula (II), m is 1. In some embodiments, for a compound of Formula (II), m is 2. In some embodiments, for a compound of Formula (II), n is 1 or 2. In some embodiments, for a compound of Formula (II), n is 1. In some embodiments, for a compound of Formula (II), n is 2.

[0222] Disclosed herein, in some embodiments, are antagonists or partial antagonists of RIPK2 having a structure of Formula (IIa) or a pharmaceutically acceptable salt or isotopic variant thereof:

[chemical structure]

[0223] wherein
[0224] Ring A is phenyl or isoxazolyl;
[0225] each R¹ is independently C₁₋₆alkyl, halogen, —C₁₋₆fluoroalkyl, or —S—C₁₋₆alkyl-C(O)OH;
[0226] R² is —H or —C(O)NHCH₃;
[0227] R⁴ is —H or halogen; and
[0228] m is 1 or 2.

[0229] Disclosed herein, in some embodiments, are antagonists or partial antagonists of RIPK2 having a structure of Formula (IIa) or a pharmaceutically acceptable salt or isotopic variant thereof:

[chemical structure]

[0230] wherein
[0231] Ring A is phenyl or isoxazolyl;
[0232] each R¹ is independently tert-butyl, —Cl, —F, —CF₃, or —SCH₂C(O)OH;
[0233] R² is —H or —C(O)NHCH₃;
[0234] R⁴ is —H or halogen; and
[0235] m is 1 or 2.

[0236] Disclosed herein, in some embodiments, are antagonists or partial antagonists of RIPK2 having a structure of Formula (IIb) or a pharmaceutically acceptable salt or isotopic variant thereof:

[chemical structure]

[0237] R¹ is halogen or —OR⁵.

[0238] In some embodiments a compound of Formula (II) or a pharmaceutically acceptable salt or isotopic variant thereof has the structure of:

[chemical structure]

[chemical structure]

[0239] Disclosed herein, in some embodiments, are antagonists or partial antagonists of RIPK2 having a structure of Formula (III) or a pharmaceutically acceptable salt or isotopic variant thereof:

[chemical structure]

[0240] wherein
[0241] X is N or CR⁴; Y is a bond, —O—, —S—, —C(R⁵)₂, —NR⁶—, —NR⁶C(O)—, —C(O)NR⁶—, or —NR⁶C(O)NR⁶—; R¹ is —H, halogen, —OH, —CN, —N(R⁶)₂, —NR⁶C(O)R⁵, —C(O)OR⁵, —C(O)N(R⁶)₂, C₁₋₆alkyl, C₂₋₆alkenyl, C₂₋₆alkynyl, C₃₋₈cycloalkyl, —C₁₋₆alkyl-OH, —C₁₋₆alkyl-OR⁵, —C₁₋₆alkyl-N(R⁶)₂, —O—C₁₋₆alkyl, —O—C₁₋₆alkyl-OH, —O—C₁₋₆alkyl-OR⁵, —O—C₁₋₆alkyl-N(R⁶)₂, or —S(═O)₂R⁵; R² and R³ are independently —H, halogen, —NO₂, —CN, —OH, —OR⁵, —SR⁵, —N(R⁶)₂, —S(O)R⁵, —S(═O)₂R⁵, —NR⁶S(═O)₂R⁵, —S(═O)₂N(R⁶)₂, —C(O)R⁵, —C(O)OR⁵, —OC(O)R⁵, —C(O)N(R⁶)₂, —OC(O)N(R⁶)₂, —NR⁶C(O)N(R⁶)₂, —NR⁶C(O)R⁵, —NR⁶C(O)OR⁵, C₁₋₆alkyl, C₂₋₆alkenyl, C₂₋₆alkynyl, C₁₋₆haloalkyl, C₁₋₆heteroalkyl, —O—C₁₋₆alkyl, C₃₋₈cycloalkyl, C₂₋₉heterocycloalkyl, C₂₋₉heteroaryl, 6- to 10-membered aryl, or —O-phenyl, wherein each alkyl, haloalkyl, heteroalkyl, cycloalkyl, heterocycloalkyl, aryl, and heteroaryl is optionally substituted with one or more R⁷; or
   [0242] R² and R³ are taken together with the atoms to which they are attached to form an optionally substituted C₃₋₈cycloalkyl; and
[0243] R⁴ is hydrogen, halogen, —N(R⁶)₂, —NO₂, C₁₋₆alkyl, C₂₋₆alkenyl, C₂₋₆alkynyl, C₁₋₆haloalkyl, C₃₋₈cycloalkyl, —C₁₋₆alkyl-C₃₋₈cycloalkyl, phenyl, —C₁₋₆alkyl-phenyl, C₂₋₉heterocycloalkyl, —C₁₋₆alkyl-C₂₋₉heterocycloalkyl, C₂₋₉heteroaryl, or —C₁₋₆alkyl-C₂₋₉heteroaryl, wherein the alkyl, haloalkyl, cycloalkyl, phenyl, heteroaryl, and heterocycloalkyl are optionally substituted;
[0244] R⁵ is —H, C₁₋₆alkyl, C₂₋₆alkenyl, C₂₋₆alkynyl, C₁₋₆haloalkyl, C₃₋₈cycloalkyl, —C₁₋₆alkyl-C₃₋₈cycloalkyl, phenyl, —C₁₋₆alkyl-phenyl, C₂₋₉heterocycloalkyl, —C₁₋₆alkyl-C₂₋₉heterocycloalkyl, C₂₋₉heteroaryl, or —C₁₋₆alkyl-C₂₋₉heteroaryl;
[0245] each R⁶ is independently —H, C₁₋₆alkyl, C₂₋₆alkenyl, C₂₋₆alkynyl, C₁₋₆haloalkyl, C₃₋₈cycloalkyl, —C₁₋₆alkyl-C₃₋₈cycloalkyl, phenyl, —C₁₋₆alkyl-phenyl, or C₂₋₉heteroaryl; or
   [0246] two R⁶ substituents are taken together with the nitrogen atom to which they are attached to form a 5- or 6-membered heterocycle; and
[0247] R⁷ is —H, halogen, C₁₋₆alkyl, C₂₋₆alkenyl, C₂₋₆alkynyl, C₁₋₆haloalkyl, C₃₋₈cycloalkyl, —C₁₋₆alkyl-C₃₋₈cycloalkyl, phenyl, —C₁₋₆alkyl-phenyl, C₂₋₉heterocycloalkyl, —C₁₋₆alkyl-C₂₋₉heterocycloalkyl, C₂₋₉heteroaryl, or —C₁₋₆alkyl-C₂₋₉heteroaryl.

[0248] In some embodiments, for a compound of Formula (III), X is N or CR⁴. In some embodiments, for a compound of Formula (III), X is N and CH. In some embodiments, for a compound of Formula (III), X is N. In some embodiments, for a compound of Formula (III), X is CH.

[0249] In some embodiments, for a compound of Formula (III), Y is a bond, —O—, —S—, —C(R⁵)₂, —NR⁶—, —NR⁶C(O)—, —C(O)NR⁶—, or —NR⁶C(O)NR⁶—. In some embodiments, for a compound of Formula (III), Y is —NR⁶C(O)— or —C(O)NR⁶—. In some embodiments, for a compound of Formula (III), Y is —NHC(O)—. In some embodiments, for a compound of Formula (III), Y is —C(O)NH—.

[0250] In some embodiments, for a compound of Formula (III), R¹ is —H, halogen, —OH, —CN, —N(R⁶)₂, —NR⁶C(O)R⁵, —C(O)OR⁵, —C(O)N(R⁶)₂, C₁₋₆alkyl, C₂₋₆alkenyl, C₂₋₆alkynyl, C₃₋₈cycloalkyl, —C₁₋₆ alkyl-OH, —C₁₋₆alkyl-OR⁵, —C₁₋₆alkyl-N(R⁶)₂, —O—C₁₋₆alkyl, —O—C₁₋₆alkyl-OH, —O—C₁₋₆alkyl-OR⁵, —O—C₁₋₆alkyl-N(R⁶)₂, or —S(═O)₂R⁵. In some embodiments, for a compound of Formula (III), R¹ is —H, halogen, —OH, —CN, —N(R⁶)₂, C₁₋₆alkyl, C₂₋₆alkynyl, or C₃₋₈cycloalkyl. In some embodiments, for a compound of Formula (III), R¹ is C₁₋₆alkyl. In some embodiments, for a compound of Formula (III), R¹ is —CH₃. In some embodiments, for a compound of Formula (III), R¹ is tert-butyl.

[0251] In some embodiments, for a compound of Formula (III), R² is —H, halogen, —NO₂, —CN, —OH, —OR⁵, —SR⁵, —N(R⁶)₂, —S(O)R⁵, —S(═O)₂R⁵, —NR⁶S(═O)₂R⁵, —S(═O)₂N(R⁶)₂, —C(O)R⁵, —C(O)OR⁵, —OC(O)R⁵, —C(O)N(R⁶)₂, —OC(O)N(R⁶)₂, —NR⁶C(O)N(R⁶)₂, —NR⁶C(O)R⁵, —NR⁶C(O)OR⁵, C₁₋₆alkyl, C₂₋₆alkenyl, C₂₋₆alkynyl, C₁₋₆haloalkyl, C₁₋₆heteroalkyl, —O—C₁₋₆alkyl, C₃₋₈cycloalkyl, C₂₋₉heterocycloalkyl, C₂₋₉heteroaryl, 6- to 10-membered aryl, or —O-phenyl, wherein each alkyl, haloalkyl, heteroalkyl, cycloalkyl, heterocycloalkyl, aryl, and heteroaryl is optionally substituted with one or more R⁷, or R² and R³ are taken together with the atoms to which they are attached to form an optionally substituted C₃₋₈cycloalkyl. In some embodiments, for a compound of Formula (III), R² is —H, halogen, —NO₂, —CN, —OH, —OR⁵, C₁₋₆alkyl, C₁₋₆haloalkyl, C₁₋₆heteroalkyl, C₃₋₈cycloalkyl, C₂₋₉heterocycloalkyl, C₂₋₉heteroaryl, or 6- to 10-membered aryl, or R² and R³ are taken together with the atoms to which they are attached to form an optionally substituted C₃₋₈cycloalkyl. In some embodiments, for a compound of Formula (III), R² is C₁₋₆alkyl, C₁₋₆haloalkyl, or C₃₋₈cycloalkyl, or R² and R³ are taken together with the atoms to which they are attached to form an optionally substituted C₃₋₈cycloalkyl. In some embodiments, for a compound of Formula (III), R² is —CH₃, —CF₃, or cyclopropyl, or R² and R³ are taken together with the atoms to which they are attached to form an optionally substituted C₃₋₈cycloalkyl. In some embodiments, for a compound of Formula (III), R² is —CH₃, —CF₃, or cyclopropyl. In some embodiments, for a compound of Formula (III), R² is —CH₃. In some embodiments, for a compound of Formula (III), R² is —CF₃. In some embodiments, for a compound of Formula (III), R² is cyclopropyl. In some embodiments, for a compound of Formula (III), R² and R³ are taken together with the atoms to which they are attached to form a C₅ cycloalkyl. In some embodiments, for a compound of Formula (III), R² and R³ are taken together with the atoms to which they are attached to form a C₅ cycloalkyl substituted with an N-methylpiperazine.

[0252] In some embodiments, for a compound of Formula (III), R³ is —H, halogen, —NO₂, —CN, —OH, —OR⁵, —SR⁵, —N(R⁶)₂, —S(O)R⁵, —S(═O)₂R⁵, —NR⁶S(═O)₂R⁵, —S(═O)₂N(R⁶)₂, —C(O)R⁵, —C(O)OR⁵, —OC(O)R⁵, —C(O)N(R⁶)₂, —OC(O)N(R⁶)₂, —NR⁶C(O)N(R⁶)₂, —NR⁶C(O)R⁵, —NR⁶C(O)OR⁵, C₁₋₆alkyl, C₂₋₆alkenyl, C₂₋₆alkynyl, C₁₋₆haloalkyl, C₁₋₆heteroalkyl, —O—C₁₋₆alkyl, C₃₋₈cycloalkyl, C₂₋₉heterocycloalkyl, C₂₋₉heteroaryl, 6- to 10-membered aryl, or —O-phenyl, wherein each alkyl, haloalkyl, heteroalkyl, cycloalkyl, heterocycloalkyl, aryl, and heteroaryl is optionally substituted with one or more R⁷, or R² and R³ are taken together with the atoms to which they are attached to form an optionally substituted C₃₋₈cycloalkyl. In some embodiments, for a compound of Formula (III), R³ is —H, halogen, —CN, —OR⁵, —N(R⁶)₂, —S(═O)₂R⁵, —C(O)R⁵, —C(O)OR⁵, —NR⁶C(O)N(R⁶)₂, —NR⁶C(O)R⁵, —NR⁶C(O)OR⁵, C₁₋₆alkyl, C₁₋₆heteroalkyl, C₂₋₉heterocycloalkyl, or C₂₋₉heteroaryl, wherein each alkyl, heteroalkyl, heterocycloalkyl, and heteroaryl is optionally substituted with one or more R⁷, or R² and R³ are taken together with the atoms to which they are attached to form an optionally substituted C₃₋₈cycloalkyl. In some embodiments, for a compound of Formula (III), R³ is C₁₋₆alkyl substituted with C₂₋₉heterocycloalkyl. In some embodiments, for a compound of Formula (III), R³ is CH₂—N— methylpiperazine. In some embodiments, for a compound of Formula (III), R² and R³ are taken together with the atoms to which they are attached to form a C₅ cycloalkyl. In some embodiments, for a compound of Formula (III), R² and R³ are taken together with the atoms to which they are attached to form a C₅ cycloalkyl substituted with an N-methylpiperazine.

[0253] Disclosed herein, in some embodiments, are antagonists or partial antagonists of RIPK2 having a structure of Formula (III) or a pharmaceutically acceptable salt or isotopic variant thereof:

[chemical structure]

[0254] wherein
[0255] R¹ is C₁₋₆alkyl.

[0256] In some embodiments a compound of Formula (III) or a pharmaceutically acceptable salt or isotopic variant thereof has the structure of:

[chemical structure]

[0257] Disclosed herein, in some embodiments are antagonists or partial antagonists of RIPK2 having a structure of Formula (IV) or a pharmaceutically acceptable salt or isotopic variant thereof:

[chemical structure]

[0258] wherein
[0259] Ring A is C₃₋₈cycloalkyl, C₂₋₉heterocycloalkyl, C₂₋₉heteroaryl, or 6- to 10-membered aryl; Y is a bond, —O—, —S—, —C(R)₂—, —NR⁶—, —NR⁶C(O)—, —C(O)NR⁶—, or —NRC(O)NR⁶—;
[0260] R¹ is —H, halogen, —OH, —CN, —N(R⁹)₂, —NR⁶C(O)R⁵, —C(O)OR⁵, —C(O)N(R⁶)₂, C₁₋₆alkyl, C₂₋₆alkenyl, C₂₋₆alkynyl, C₃₋₈cycloalkyl, —C₁₋₆alkyl-OH, —C₁₋₆alkyl-OR⁵, —C₁₋₆alkyl-N(R⁶)₂, —O—C₁₋₆alkyl, —O—C₁₋₆alkyl-OH, —O—C₁₋₆alkyl-OR⁵, —O—C₁₋₆alkyl-N(R⁹)₂, or —S(═O)₂R⁵;
[0261] R² is —H, halogen, —NO₂, —CN, —OH, —OR⁵, —SR⁵, —N(R⁶)₂, —S(O)R⁵, —S(═O)₂R⁵, —NR⁶S(═O)₂R⁵, S(═O)₂N(R⁹)₂, —C(O)R⁵, —C(O)OR⁵, —OC(O)R⁵, —C(O)N(R⁶)₂, —OC(O)N(R⁹)₂, —NR⁶C(O)N(R⁶)₂, —NR⁶C(O)R⁵, —NR⁶C(O)OR⁵, C₁₋₆alkyl, C₂₋₆alkenyl, C₂₋₆alkynyl, C₁₋₆haloalkyl, C₁₋₆heteroalkyl, —O—C₁₋₆alkyl, C₃₋₈cycloalkyl, C₂₋₉heterocycloalkyl, C₂₋₉heteroaryl, 6- to 10-membered aryl, or —O-phenyl, wherein each alkyl, haloalkyl, heteroalkyl, cycloalkyl, heterocycloalkyl, aryl, and heteroaryl is optionally substituted with one or more R⁷;
[0262] R⁵ is —H, C₁₋₆alkyl, C₂₋₆alkenyl, C₂₋₆alkynyl, C₁₋₆haloalkyl, C₃₋₈cycloalkyl, —C₁₋₆alkyl-C₃₋₈cycloalkyl, phenyl, —C₁₋₆alkyl-phenyl, C₂₋₉heterocycloalkyl, —C₁₋₆alkyl-C₂₋₉heterocycloalkyl, C₂₋₉heteroaryl, or —C₁₋₆alkyl-C₂₋₉heteroaryl;
[0263] each R⁶ is independently —H, C₁₋₆alkyl, C₂₋₆alkenyl, C₂₋₆alkynyl, C₁₋₆haloalkyl, C₃₋₈cycloalkyl, —C₁₋₆alkyl-C₃₋₈cycloalkyl, phenyl, —C₁₋₆alkyl-phenyl, or C₂₋₉heteroaryl; or two R⁶ substituents are taken together with the nitrogen atom to which they are attached to form a 5- or 6-membered heterocycle;
[0264] R⁷ is —H, halogen, C₁₋₆alkyl, C₂₋₆alkenyl, C₂₋₆alkynyl, C₁₋₆haloalkyl, C₃₋₈cycloalkyl, —C₁₋₆alkyl-C₃₋₈cycloalkyl, phenyl, —C₁₋₆alkyl-phenyl, C₂₋₉heterocycloalkyl, —C₁₋₆alkyl-C₂₋₉heterocycloalkyl, C₂₋₉heteroaryl, or —C₁₋₆alkyl-C₂₋₉heteroaryl; and
[0265] n is 0, 1, 2, 3, 4, or 5.

[0266] In some embodiments, for a compound of Formula (IV), Ring A is C₃₋₈cycloalkyl, C₂₋₉heterocycloalkyl, C₂₋₉heteroaryl, or 6- to 10-membered aryl. In some embodiments, for a compound of Formula (IV), Ring A is 6- to 10-membered aryl. In some embodiments, for a compound of Formula (IV), Ring A is phenyl. In some embodiments, for a compound of Formula (IV), Ring A is naphthyl.

[0267] In some embodiments, for a compound of Formula (IV), Y is a bond, —O—, —S—, —C(R⁵)₂—, —NR⁶—, —NR⁶C(O)—, —C(O)NR⁶—, or —NR⁶C(O)NR⁶—. In some embodiments, for a compound of Formula (IV), Y is a bond or —C(R⁵)₂—. In some embodiments, for a compound of Formula (IV), Y is a bond In some embodiments, for a compound of Formula (IV), Y is —CH₂—.

[0268] In some embodiments, for a compound of Formula (IV), R¹ is —H, halogen, —OH, —CN, —N(R⁶)₂, —NR⁶C(O)R⁵, —C(O)OR⁵, —C(O)N(R⁶)₂, C₁₋₆alkyl, C₂₋₆alkenyl, C₂₋₆alkynyl, C₃₋₈cycloalkyl, —C₁₋₆alkyl-OH, —C₁₋₆alkyl-OR⁵, —C₁₋₆alkyl-N(R⁶)₂, —O—C₁₋₆alkyl, —O—C₁₋₆alkyl-OH, —O—C₁₋₆alkyl-OR⁵, —O—C₁₋₆alkyl-N(R⁶)₂, or —S(═O)₂R⁵. In some embodiments, for a compound of Formula (IV), R¹ is —H, halogen, or C₁₋₆alkyl. In some embodiments, for a compound of Formula (IV), R¹ is —H, —C₁, or CH₃. In some embodiments, for a compound of Formula (IV), R¹ is —H. In some embodiments, for a compound of Formula (IV), R¹ is —Cl. In some embodiments, for a compound of Formula (IV), R¹ is —CH₃.

[0269] In some embodiments, for a compound of Formula (IV), R² is —H, halogen, —NO₂, —CN, —OH, —OR⁵, —SR⁵, —N(R⁶)₂, —S(O)R⁵, —S(═O)₂R⁵, —NR⁶S(═O)₂R⁵, —S(═O)₂N(R⁶)₂, —C(O)R⁵, —C(O)OR⁵, —OC(O)R⁵, —C(O)N(R⁶)₂, —OC(O)N(R⁶)₂, —NR⁶C(O)N(R⁶)₂, —NR⁶C(O)R⁵, —NR⁶C(O)OR⁵, C₁₋₆alkyl, C₂₋₆alkenyl, C₂₋₆alkynyl, C₁₋₆haloalkyl, C₁₋₆heteroalkyl, —O—C₁₋₆alkyl, C₃₋₈cycloalkyl, C₂₋₉heterocycloalkyl, C₂₋₉heteroaryl, 6- to 10-membered aryl, or —O-phenyl, wherein each alkyl, haloalkyl, heteroalkyl, cycloalkyl, heterocycloalkyl, aryl, and heteroaryl is optionally substituted with one or more R⁷. In some embodiments, for a compound of Formula (IV), R² is —H or —NR⁶C(O)R⁵. In some embodiments, for a compound of Formula (IV), R² is —H or —NR⁶C(O)C₂₋₉heteroaryl. In some embodiments, for a compound of Formula (IV), R² is —H In some embodiments, for a compound of Formula (IV), R² is —NHC(O)pyridyl.

[0270] In some embodiments, for a compound of Formula (IV), n is 1, 2, or 3. In some embodiments, for a compound of Formula (IV), n is 1 or 2. In some embodiments, for a compound of Formula (IV), n is 1. In some embodiments, for a compound of Formula (IV), n is 2. In some embodiments, for a compound of Formula (IV), n is 3.

[0271] Disclosed herein, in some embodiments, are antagonists or partial antagonists of RIPK2 having a structure of Formula (IVa) or a pharmaceutically acceptable salt or isotopic variant thereof:

[chemical structure]

[0272] wherein
[0273] R¹ is halogen or C₁₋₆alkyl.

[0274] Disclosed herein, in some embodiments, are antagonists or partial antagonists of RIPK2 having a structure of Formula (IVb) or a pharmaceutically acceptable salt or isotopic variant thereof:

[chemical structure]

[0275] wherein Y is a bond or —C₁₋₃alkyl-.

[0276] Disclosed herein, in some embodiments, are antagonists or partial antagonists of RIPK2 having a structure of Formula (IVb) or a pharmaceutically acceptable salt or isotopic variant thereof:

[chemical structure]

[0277] wherein
[0278] Y is a bond or —CH₂—.

[0279] In some embodiments a compound of Formula (IV) or a pharmaceutically acceptable salt or isotopic variant thereof has the structure of:

[chemical structure]

[0280] Disclosed herein, in some embodiments, are antagonists or partial antagonists of RIPK2 having a structure of Formula (V) or a pharmaceutically acceptable salt or isotopic variant thereof:

[chemical structure]

[0281] wherein
[0282] X¹ and X² are independently N or CR⁴;
[0283] Y is S, O, or NR¹;
[0284] R¹ is —H, —S(═O)₂R⁵, —S(═O)₂N(R⁶)₂, —C(O)R⁵, —C(O)OR⁵, —C(O)N(R⁶)₂, C₁₋₆alkyl, C₂₋₆alkenyl, C₂₋₆alkynyl, C₁₋₆haloalkyl, C₁₋₆heteroalkyl, C₃₋₈cycloalkyl, C₂₋₉heterocycloalkyl, C₂₋₉heteroaryl, or 6- to 10-membered aryl, wherein each alkyl, haloalkyl, heteroalkyl, cycloalkyl, heterocycloalkyl, aryl, and heteroaryl is optionally substituted with one or more R⁷;
[0285] R² is —H, halogen, —NO₂, —CN, —OH, —OR⁵, —SR⁵, —N(R⁶)₂, —S(O)R⁵, —S(═O)₂R⁵, —NR⁶S(═O)₂R⁵, —S(═O)₂N(R⁶)₂, —C(O)R⁵, —C(O)OR⁵, —OC(O)R⁵, —C(O)N(R⁶)₂, —OC(O)N(R⁶)₂, —NR⁶C(O)N(R⁶)₂, —NR⁶C(O)R⁵, —NR⁶C(O)OR⁵, C₁₋₆alkyl, C₂₋₆alkenyl, C₂₋₆alkynyl, C₁₋₆haloalkyl, C₁₋₆heteroalkyl, —O—C₁₋₆alkyl, C₃₋₈cycloalkyl, C₂₋₉heterocycloalkyl, C₂₋₉heteroaryl, 6- to 10-membered aryl, or —O-phenyl, wherein each alkyl, haloalkyl, heteroalkyl, cycloalkyl, heterocycloalkyl, aryl, and heteroaryl is optionally substituted with one or more R⁷; or
   [0286] R¹ and R² are taken together with the atoms to which they are attached to form an optionally substituted C₃-8heterocycloalkyl; and
[0287] R³ and R⁴ are independently —H, halogen, —NO₂, —CN, —OH, —OR⁵, —SR⁵, —N(R⁶)₂, —S(O)R⁵, —S(═O)₂R⁵, —NR⁶S(═O)₂R⁵, —S(═O)₂N(R⁶)₂, —C(O)R⁵, —C(O)OR⁵, —OC(O)R⁵, —C(O)N(R⁶)₂, —OC(O)N(R⁶)₂, —NR⁶C(O)N(R⁶)₂, —NR⁶C(O)R⁵, —NR⁶C(O)OR⁵, C₁₋₆alkyl, C₂₋₆alkenyl, C₂₋₆alkynyl, C₁₋₆haloalkyl, C₁₋₆heteroalkyl, —O—C₁₋₆alkyl, C₃₋₈cycloalkyl, C₂₋₉heterocycloalkyl, C₂₋₉heteroaryl, 6- to 10-membered aryl, or —O-phenyl, wherein each alkyl, haloalkyl, heteroalkyl, cycloalkyl, heterocycloalkyl, aryl, and heteroaryl is optionally substituted with one or more R⁷;
[0288] R⁵ is —H, C₁₋₆alkyl, C₂₋₆alkenyl, C₂₋₆alkynyl, C₁₋₆haloalkyl, C₃₋₈-cycloalkyl, —C₁₋₆alkyl-C₃₋₈cycloalkyl, phenyl, —C₁₋₆alkyl-phenyl, C₂₋₉heterocycloalkyl, —C₁₋₆alkyl-C₂₋₉heterocycloalkyl, C₂₋₉heteroaryl, or —C₁₋₆alkyl-C₂₋₉heteroaryl;
[0289] each R⁶ is independently —H, C₁₋₆alkyl, C₂₋₆alkenyl, C₂₋₆alkynyl, C₁₋₆haloalkyl, C₃₋₈cycloalkyl, —C₁₋₆alkyl-C₃₋₈cycloalkyl, phenyl, —C₁₋₆alkyl-phenyl, or C₂₋₉heteroaryl; or two R⁶ substituents are taken together with the nitrogen atom to which they are attached to form a 5- or 6-membered heterocycle; and
[0290] R⁷ is —H, halogen, —S(═O)CH₃, —N(R⁶)₂, —C(O)N(R⁶)₂, C₁₋₆alkyl, C₂₋₆alkenyl, C₂₋₆alkynyl, C₁₋₆haloalkyl, C₁₋₆heteroalkyl, C₃₋₈cycloalkyl, —C₁₋₆alkyl-C₃₋₈cycloalkyl, phenyl, —C₁₋₆alkyl-phenyl, C₂₋₉heterocycloalkyl, —C₁₋₆alkyl-C₂₋₉heterocycloalkyl, C₂₋₉heteroaryl, or —C₁₋₆alkyl-C₂₋₉heteroaryl.

[0291] In some embodiments, for a compound of Formula (V), X¹ and X² are independently N or CR⁴. In some embodiments, for a compound of Formula (V), X¹ is N. In some embodiments, for a compound of Formula (V), X¹ is CR⁴. In some embodiments, for a compound of Formula (V), X² is N In some embodiments, for a compound of Formula (V), X² is CR⁴. In some embodiments, for a compound of Formula (V), X¹ is N and X² is CR⁴. In some embodiments, for a compound of Formula (V), X¹ is CR⁴ and X² is N.

[0292] In some embodiments, for a compound of Formula (V), Y is S, O, or NR¹. In some embodiments, for a compound of Formula (V), Y is S. In some embodiments, for a compound of Formula (V), Y is NH. In some embodiments, for a compound of Formula (V), Y is NR¹.

[0293] In some embodiments, for a compound of Formula (V), R¹ is —H, —S(═O)₂R⁵, —S(═O)₂N(R⁶)₂, —C(O)R⁵, —C(O)OR⁵, —C(O)N(R⁶)₂, C₁₋₆alkyl, C₂₋₆alkenyl, C₂₋₆alkynyl, C₁₋₆haloalkyl, C₁₋₆heteroalkyl, C₃₋₈cycloalkyl, C₂₋₉heterocycloalkyl, C₂₋₉heteroaryl, or 6- to 10-membered aryl, wherein each alkyl, haloalkyl, heteroalkyl, cycloalkyl, heterocycloalkyl, aryl, and heteroaryl is optionally substituted with one or more R⁷. In some embodiments, for a compound of Formula (V), R¹ is —H, C₁₋₆alkyl, C₃₋₈cycloalkyl, C₂₋₉heterocycloalkyl, C₂₋₉heteroaryl, or 6- to 10-membered aryl, wherein each cycloalkyl, heterocyloalkyl, aryl, and heteroaryl is optionally substituted with one or more R⁷. In some embodiments, for a compound of Formula (V), R¹ is aryl optionally substituted with one or more R⁷. In some embodiments, for a compound of Formula (V), R¹ is 2,4-dichlorophenyl.

[0294] In some embodiments, for a compound of Formula (V), R² is —H, halogen, —NO₂, —CN, —OH, —OR⁵, —SR⁵, —N(R⁶)₂, —S(O)R⁵, —S(═O)₂R⁵, —NR⁶S(═O)₂R⁵, —S(═O)₂N(R⁶)₂, —C(O)R⁵, —C(O)OR⁵, —OC(O)R⁵, —C(O)N(R⁶)₂, —OC(O)N(R⁶)₂, —NR⁶C(O)N(R⁶)₂, —NR⁶C(O)R⁵, —NR⁶C(O)OR⁵, C₁₋₆alkyl, C₂₋₆alkenyl, C₂₋₆alkynyl, C₁₋₆haloalkyl, C₁₋₆heteroalkyl, —O—C₁₋₆alkyl, C₃₋₈cycloalkyl, C₂₋₉heterocycloalkyl, C₂₋₉heteroaryl, 6- to 10-membered aryl, or —O-phenyl, wherein each alkyl, haloalkyl, heteroalkyl, cycloalkyl, heterocycloalkyl, aryl, and heteroaryl is optionally substituted with one or more R⁷, or R¹ and R² are taken together with the atoms to which they are attached to form an optionally substituted C₃₋₈heterocycloalkyl. In some embodiments, for a compound of Formula (V), R² is —H, halogen, —S(═O)₂R⁵, —NR⁶S(═O)₂R⁵, —S(═O)₂N(R⁶)₂, —C(O)R⁵, —C(O)OR⁵, —C(O)N(R⁶)₂, C₁₋₆alkyl, C₂₋₆alkenyl, C₂₋₆alkynyl, C₃₋₈cycloalkyl, C₂₋₉heterocycloalkyl, C₂₋₉heteroaryl, 6- to 10-membered aryl, or —O-phenyl, wherein each alkyl, cycloalkyl, heterocycloalkyl, aryl, and heteroaryl is optionally substituted with one or more R⁷, or R¹ and R² are taken together with the atoms to which they are attached to form an optionally substituted C₃₋₈heterocycloalkyl. In some embodiments, for a compound of Formula (V), R² is —C(O)N(R⁶)₂ or 6-membered aryl optionally substituted with one or more R⁷. In some embodiments, for a compound of Formula (V), R² is 4-fluorophenyl. In some embodiments, for a compound of Formula (V), R² is 4-chlorophenyl. In some embodiments, for a compound of Formula (V), R² is 2-methylpyridinyl. In some embodiments, for a compound of Formula (V), R² is —C(O)NH-(2-methyl-6-chlorophenyl). In some embodiments, for a compound of Formula (V), R¹ and R² are taken together with the atoms to which they are attached to form an optionally substituted C₃₋₈heterocycloalkyl. In some embodiments, for a compound of Formula (V), R¹ and R² are taken together with the atoms to which they are attached to form a C₅ heterocycloalkyl.

[0295] In some embodiments, for a compound of Formula (V), R³ is —H, halogen, —NO₂, —CN, —OH, —OR⁵, —SR⁵, —N(R⁶)₂, —S(O)R⁵, —S(═O)₂R⁵, —NR⁶S(═O)₂R⁵, —S(═O)₂N(R⁶)₂, —C(O)R⁵, —C(O)OR⁵, —OC(O)R⁵, —C(O)N(R⁶)₂, —OC(O)N(R⁶)₂, —NR⁶C(O)N(R⁶)₂, —NR⁶C(O)R⁵, —NR⁶C(O)OR⁵, C₁₋₆alkyl, C₂₋₆alkenyl, C₂₋₆alkynyl, C₁₋₆haloalkyl, C₁₋₆heteroalkyl, —O—C₁₋₆alkyl, C₃₋₈cycloalkyl, C₂₋₉heterocycloalkyl, C₂₋₉heteroaryl, 6- to 10-membered aryl, or —O-phenyl, wherein each alkyl, haloalkyl, heteroalkyl, cycloalkyl, heterocycloalkyl, aryl, and heteroaryl is optionally substituted with one or more R⁷. In some embodiments, for a compound of Formula (V), R³ is —H, C₁₋₆alkyl, C₂₋₆alkenyl, C₂₋₆alkynyl, C₁₋₆haloalkyl, C₁₋₆heteroalkyl, —O—C₁₋₆alkyl, C₃₋₈cycloalkyl, C₂₋₉heterocycloalkyl, C₂₋₉heteroaryl, 6- to 10-membered aryl, or —O-phenyl, wherein each alkyl, haloalkyl, heteroalkyl, cycloalkyl, heterocycloalkyl, aryl, and heteroaryl is optionally substituted with one or more R⁷. In some embodiments, for a compound of Formula (V), R³ is —H or C₂₋₉heteroaryl optionally substituted with one or more R⁷. In some embodiments, for a compound of Formula (V), R³ is H. In some embodiments, for a compound of Formula (V), R³ is C₂₋₉heteroaryl optionally substituted with one or more R⁷. In some embodiments, for a compound of Formula (V), R³ is optionally substituted pyridinyl. In some embodiments, for a compound of Formula (V), R³ is optionally substituted quinolinyl. In some embodiments, for a compound of Formula (V), R³ is optionally substituted [1,2,4]triazolopyridinyl.

[0296] In some embodiments, for a compound of Formula (V), R⁴ is —H, halogen, —NO₂, —CN, —OH, —OR⁵, —SR⁵, —N(R⁶)₂, —S(O)R⁵, —S(═O)₂R⁵, —NR⁶S(═O)₂R⁵, —S(═O)₂N(R⁶)₂, —C(O)R⁵, —C(O)OR⁵, —OC(O)R⁵, —C(O)N(R⁶)₂, —OC(O)N(R⁶)₂, —NR⁶C(O)N(R⁶)₂, —NR⁶C(O)R⁵, —NR⁶C(O)OR⁵, C₁₋₆alkyl, C₂₋₆alkenyl, C₂₋₆alkynyl, C₁₋₆haloalkyl, C₁₋₆heteroalkyl, —O—C₁₋₆alkyl, C₃₋₈cycloalkyl, C₂₋₉heterocycloalkyl, C₂₋₉heteroaryl, 6- to 10-membered aryl, or —O-phenyl, wherein each alkyl, haloalkyl, heteroalkyl, cycloalkyl, heterocycloalkyl, aryl, and heteroaryl is optionally substituted with one or more R⁷. In some embodiments, for a compound of Formula (V), R⁴ is —H, —N(R⁶)₂, —C(O)R⁵, —C(O)OR⁵, —OC(O)R⁵, —C(O)N(R⁶)₂, —OC(O)N(R⁶)₂, C₁₋₆alkyl, C₂₋₆alkenyl, C₂₋₆alkynyl, C₁₋₆haloalkyl, C₁₋₆heteroalkyl, —O—C₁₋₆alkyl, C₃₋₈cycloalkyl, C₂₋₉heterocycloalkyl, C₂₋₉heteroaryl, 6- to 10-membered aryl, or —O-phenyl, wherein each alkyl, haloalkyl, heteroalkyl, cycloalkyl, heterocycloalkyl, aryl, and heteroaryl is optionally substituted with one or more R⁷. In some embodiments, for a compound of Formula (V), R⁴ is —N(R⁶)₂, C₁₋₆alkyl, C₂₋₉heteroaryl, or 6- to 10-membered aryl, wherein each aryl and heteroaryl is optionally substituted with one or more R⁷. In some embodiments, for a compound of Formula (V), R⁴ is optionally substituted phenyl. In some embodiments, for a compound of Formula (V), R⁴ is optionally substituted pyridyl. In some embodiments, for a compound of Formula (V), R⁴ is —NHpyrimidine. In some embodiments, for a compound of Formula (V), R⁴ is —CH₂phenyl. In some embodiments, for a compound of Formula (V), R⁴ is CH₂NHphenyl.

[0297] In some embodiments a compound of Formula (V) or a pharmaceutically acceptable salt or isotopic variant thereof has the structure of:

[chemical structure]

[0298] Disclosed herein, in some embodiments, are antagonists or partial antagonists of RIPK2 having a structure of Formula (VI) or a pharmaceutically acceptable salt or isotopic variant thereof.

[chemical structure]

[0299] wherein
[0300] X¹ and X² are independently N or C;
[0301] X³ is N or CR⁴;
[0302] Y is a bond, —O—, —S—, —C(R⁵)₂, —NR⁶—, —NR⁶C(O)—, —C(O)NR⁶—, or —NR⁶C(O)NR⁶—; R is —H, halogen, —NO₂, —CN, —OH, —OR⁵, —SR⁵, —N(R⁶)₂, —S(O)R⁵, —S(═O)₂R⁵, —NR⁶S(═O)₂R⁵, —S(═O)₂N(R⁶)₂, —C(O)R⁵, —C(O)OR⁵, —OC(O)R⁵, —C(O)N(R⁶)₂, —OC(O)N(R⁶₂, —NR⁶C(O)N(R⁶)₂, —NR⁶C(O)R⁵, —NR⁶C(O)OR⁵, C₁₋₆alkyl, C₂₋₆alkenyl, C₂₋₆alkynyl, C₁₋₆haloalkyl, C₁₋₆heteroalkyl, —O—C₁₋₆alkyl, C₃₋₈cycloalkyl, C₂₋₉heterocycloalkyl, C₂₋₉heteroaryl, 6- to 10-membered aryl, or —O-phenyl, wherein each alkyl, haloalkyl, heteroalkyl, cycloalkyl, heterocycloalkyl, aryl, and heteroaryl is optionally substituted with one or more R⁷;
[0303] R⁴ is —H, halogen, C₁₋₆alkyl, C₂₋₆alkenyl, C₂₋₆alkynyl, C₁₋₆haloalkyl, C₃₋₈cycloalkyl, —C₁₋₆alkyl-C₃₋₈cycloalkyl, phenyl, —C₁₋₆alkyl-phenyl, C₂₋₉heterocycloalkyl, —C₁₋₆alkyl-C₂₋₉heterocycloalkyl, C₂₋₉heteroaryl, or —C₁₋₆alkyl-C₂₋₉heteroaryl, wherein the alkyl, haloalkyl, cycloalkyl, phenyl, heteroaryl, and heterocycloalkyl are optionally substituted;
[0304] R⁵ is —H, C₁₋₆alkyl, C₂₋₆alkenyl, C₂₋₆alkynyl, C₁₋₆haloalkyl, C₃₋₈cycloalkyl, —C₁₋₆alkyl-C₃₋₈cycloalkyl, phenyl, —C₁₋₆alkyl-phenyl, C₂₋₉heterocycloalkyl, —C₁₋₆alkyl-C₂₋₉heterocycloalkyl, C₂₋₉heteroaryl, or —C₁₋₆alkyl-C₂₋₉heteroaryl;
[0305] each R⁶ is independently —H, C₁₋₆alkyl, C₂₋₆alkenyl, C₂₋₆alkynyl, C₁₋₆haloalkyl, C₃₋₈cycloalkyl, —C₁₋₆alkyl-C₃₋₈cycloalkyl, phenyl, —C₁₋₆alkyl-phenyl, or C₂₋₉heteroaryl; or two R⁶ are taken together with the nitrogen atom to which they are attached to form a 5- or 6-membered heterocycle; and
[0306] R⁷ is —H, halogen, —S(═O)CH₃, —N(R⁶)₂, —C(O)N(R⁶)₂, C₁₋₆alkyl, C₂₋₆alkenyl, C₂₋₆alkynyl, C₁₋₆haloalkyl, C₁₋₆heteroalkyl, C₃₋₈cycloalkyl, —C₁₋₆alkyl-C₃₋₈cycloalkyl, phenyl, —C₁₋₆alkyl-phenyl, C₂₋₉heterocycloalkyl, —C₁₋₆alkyl-C₂₋₉heterocycloalkyl, C₂₋₉heteroaryl, or —C₁₋₆alkyl-C₂₋₉heteroaryl.

[0307] In some embodiments, for a compound of Formula (VII), X¹ and X² are independently N or C. In some embodiments, for a compound of Formula (VII), X¹ is N. In some embodiments, for a compound of Formula (VII), X¹ is C. In some embodiments, for a compound of Formula (VII), X² is N. In some embodiments, for a compound of Formula (VII), X² is C. In some embodiments, for a compound of Formula (VII), X¹ is N and X² is C. In some embodiments, for a compound of Formula (VII), X¹ is C and X² is N.

[0308] In some embodiments, for a compound of Formula (VII), X³ is N or CR⁴. In some embodiments, for a compound of Formula (VII), X³ is N or CH. In some embodiments, for a compound of Formula (VII), X³ is N. In some embodiments, for a compound of Formula (VII), X³ is CH.

[0309] In some embodiments, for a compound of Formula (VI), Y is a bond, —O—, —S—, —C(R⁵)₂, —NR⁶—, —NR⁶C(O)—, —C(O)NR⁶—, or —NR⁶C(O)NR⁶—. In some embodiments, for a compound of Formula (VI), Y is —O— or —NR⁶—. In some embodiments, for a compound of Formula (VI), Y is —O— or —NH—. In some embodiments, for a compound of Formula (VI), Y is —O—. In some embodiments, for a compound of Formula (VI), Y is —NH—.

[0310] In some embodiments, for a compound of Formula (VI), R is —H, halogen, —NO₂, —CN, —OH, —OR⁵, —SR⁵, —N(R⁶)₂, —S(O)R⁵, —S(═O)₂R⁵, —NR⁶S(═O)₂R⁵, —S(═O)₂N(R⁶)₂, —C(O)R⁵, —C(O)OR⁵, —OC(O)R⁵, —C(O)N(R⁶)₂, —OC(O)N(R⁶)₂, —NR⁶C(O)N(R⁶)₂, —NR⁶C(O)R⁵, —NR⁶C(O)OR⁵, C₁₋₆alkyl, C₂₋₆alkenyl, C₂₋₆alkynyl, C₁₋₆haloalkyl, C₁₋₆heteroalkyl, —O—C₁₋₆alkyl, C₃₋₈cycloalkyl, C₂₋₉heterocycloalkyl, C₂₋₉heteroaryl, 6- to 10-membered aryl, or —O-phenyl, wherein each alkyl, haloalkyl, heteroalkyl, cycloalkyl, heterocycloalkyl, aryl, and heteroaryl is optionally substituted with one or more R⁷. In some embodiments, for a compound of Formula (VI), R is —H, halogen, —S(═O)₂R⁵, —NR⁶S(═O)₂R⁵, —S(═O)₂N(R⁶)₂, —C(O)R⁵, —C(O)OR⁵, —OC(O)R⁵, —C(O)N(R⁶)₂, —OC(O)N(R⁶)₂, C₁₋₆alkyl, C₂₋₆alkenyl, C₁₋₆heteroalkyl, C₃₋₈cycloalkyl, C₂₋₉heterocycloalkyl, C₂₋₉heteroaryl, 6- to 10-membered aryl, or —O-phenyl, wherein each alkyl, heteroalkyl, cycloalkyl, heterocycloalkyl, aryl, and heteroaryl is optionally substituted with one or more R⁷. In some embodiments, for a compound of Formula (VI), R is —H or halogen. In some embodiments, for a compound of Formula (VI), R is —H. In some embodiments, for a compound of Formula (VI), R is —Cl.

[0311] In some embodiments a compound of Formula (VI) or a pharmaceutically acceptable salt or isotopic variant thereof has the structure of:

[chemical structure]

[0312] Disclosed herein, in some embodiments, are antagonists or partial antagonists of RIPK2 having a structure of Formula (VII) or a pharmaceutically acceptable salt or isotopic variant thereof:

[chemical structure]

[0313] wherein
[0314] X¹ and X² are independently N or C;
[0315] X³ is N or CR⁴;
[0316] Y is a bond, —O—, —S—, —C(R⁵)₂, —NR⁶—, —NR⁶C(O)—, —C(O)NR⁶—, or —NR⁶C(O)NR⁶—; R¹ and R² are independently —H, halogen, —OH, —CN, —N(R⁶)₂, —NR⁶C(O)R⁵, —C(O)OR⁵, —C(O)N(R⁶)₂, C₁₋₆alkyl, C₂₋₆alkenyl, C₂₋₆alkynyl, C₃₋₈cycloalkyl, —C₁₋₆alkyl-OH, —C₁₋₆alkyl-OR⁵, —C₁₋₆alkyl-N(R⁶)₂, —O—C₁₋₆alkyl, —O—C₁₋₆alkyl-OH, —O—C₁₋₆alkyl-OR⁵, —O—C₁₋₆alkyl-N(R⁶)₂, or —S(═O)₂R⁵;
[0317] R³ is —H, halogen, —NO₂, —CN, —OH, —OR⁵, —SR⁵, —N(R⁶)₂, —S(O)R⁵, —S(═O)₂R⁵, —NR⁶S(═O)₂R⁵, —S(═O)₂N(R⁶)₂, —C(O)R⁵, —C(O)OR⁵, —OC(O)R⁵, —C(O)N(R⁶)₂, —OC(O)N(R⁶)₂, —NR⁶C(O)N(R⁶)₂, —NR⁶C(O)R⁵, —NR⁶C(O)OR⁵, C₁₋₆alkyl, C₂₋₆alkenyl, C₂₋₆alkynyl, C₁₋₆haloalkyl, C₁₋₆heteroalkyl, —O—C₁₋₆alkyl, C₃₋₈cycloalkyl, C₂₋₉heterocycloalkyl, C₂₋₉heteroaryl, 6- to 10-membered aryl, or —O-phenyl, wherein each alkyl, haloalkyl, heteroalkyl, cycloalkyl, heterocycloalkyl, aryl, and heteroaryl is optionally substituted with one or more R⁷;
[0318] R⁴ is —H, halogen, C₁₋₆alkyl, C₂₋₆alkenyl, C₂₋₆alkynyl, C₁₋₆haloalkyl, C₃₋₈cycloalkyl, —C₁₋₆alkyl-C₃₋₈cycloalkyl, phenyl, —C₁₋₆alkyl-phenyl, C₂₋₉heterocycloalkyl, —C₁₋₆alkyl-C₂₋₉heterocycloalkyl, C₂₋₉heteroaryl, or —C₁₋₆alkyl-C₂₋₉heteroaryl, wherein the alkyl, haloalkyl, cycloalkyl, phenyl, heteroaryl, and heterocycloalkyl are optionally substituted;
[0319] R⁵ is —H, C₁₋₆alkyl, C₂₋₆alkenyl, C₂₋₆alkynyl, C₁₋₆haloalkyl, C₃₋₈cycloalkyl, —C₁₋₆alkyl-C₃₋₈cycloalkyl, phenyl, —C₁₋₆alkyl-phenyl, C₂₋₉heterocycloalkyl, —C₁₋₆alkyl-C₂₋₉heterocycloalkyl, C₂₋₉heteroaryl, or —C₁₋₆alkyl-C₂₋₉heteroaryl;
[0320] each R⁶ is independently —H, C₁₋₆alkyl, C₂₋₆alkenyl, C₂₋₆alkynyl, C₁₋₆haloalkyl, C₃₋₈cycloalkyl, —C₁₋₆alkyl-C₃₋₈cycloalkyl, phenyl, —C₁₋₆alkyl-phenyl, or C₂₋₉heteroaryl; or two R⁶ substituents are taken together with the nitrogen atom to which they are attached to form a 5- or 6-membered heterocycle;
[0321] R⁷ is —H, halogen, —S(═O)CH₃, —N(R⁶)₂, —C(O)N(R⁶)₂, C₁₋₆alkyl, C₂₋₆alkenyl, C₂₋₆alkynyl, C₁₋₆haloalkyl, C₁₋₆heteroalkyl, C₃₋₈cycloalkyl, —C₁₋₆alkyl-C₃₋₈cycloalkyl, phenyl, —C₁₋₆alkyl-phenyl, C₂₋₉heterocycloalkyl, —C₁₋₆alkyl-C₂₋₉heterocycloalkyl, C₂₋₉heteroaryl, or —C₁₋₆alkyl-C₂₋₉heteroaryl; and
[0322] n is 0, 1, 2, 3, 4, or 5.

[0323] In some embodiments, for a compound of Formula (VII), X¹ and X² are independently N or C. In some embodiments, for a compound of Formula (VII), X¹ is N. In some embodiments, for a compound of Formula (VII), X¹ is C. In some embodiments, for a compound of Formula (VII), X² is N. In some embodiments, for a compound of Formula (VII), X² is C. In some embodiments, for a compound of Formula (VII), X¹ is N and X² is C. In some embodiments, for a compound of Formula (VII), X¹ is C and X² is N.

[0324] In some embodiments, for a compound of Formula (VII), X³ is N or CR⁴. In some embodiments, for a compound of Formula (VII), X³ is N or CH. In some embodiments, for a compound of Formula (VII), X³ is N. In some embodiments, for a compound of Formula (VII), X³ is CH.

[0325] In some embodiments, for a compound of Formula (VII), Y is a bond, —O—, —S—, —C(R⁵)₂, —NR⁶—, —NR⁶C(O)—, —C(O)NR⁶—, or —NR⁶C(O)NR⁶—. In some embodiments, for a compound of Formula (VII), Y is a bond, —NR⁶C(O)—, or —C(O)NR⁶—. In some embodiments, for a compound of Formula (VII), Y is a bond, —NHC(O)—, or —C(O)NH—. In some embodiments, for a compound of Formula (VII), Y is a bond. In some embodiments, for a compound of Formula (VII), Y is —NHC(O)—. In some embodiments, for a compound of Formula (VII), Y is —C(O)NH—.

[0326] In some embodiments, for a compound of Formula (VII), R¹ is —H, halogen, —OH, —CN, —N(R⁶)₂, —NR⁶C(O)R⁵, —C(O)OR⁵, —C(O)N(R⁶)₂, C₁₋₆alkyl, C₂₋₆alkenyl, C₂₋₆alkynyl, C₃₋₈cycloalkyl, —C₁₋₆alkyl-OH, —C₁₋₆alkyl-OR⁵, —C₁₋₆alkyl-N(R⁶)₂, —O—C₁₋₆alkyl, —O—C₁₋₆alkyl-OH, —O—C₁₋₆alkyl-OR⁵, —O—C₁₋₆alkyl-N(R⁶)₂, or —S(═O)₂R⁵. In some embodiments, for a compound of Formula (VII), R¹ is —H, halogen, —N(R⁶)₂, —NR⁶C(O)R⁵, C₁₋₆alkyl, C₃₋₈cycloalkyl, —C₁₋₆alkyl-OH, —C₁₋₆alkyl-OR⁵, —C₁₋₆alkyl-N(R⁶)₂, —O—C₁₋₆alkyl-N(R⁶)₂, or —S(═O)₂R⁵. In some embodiments, for a compound of Formula (VII), R¹ is —H or —S(═O)₂R⁵. In some embodiments, for a compound of Formula (VII), R¹ is —H. In some embodiments, for a compound of Formula (VII), R¹ is —S(═O)₂iso-propyl. In some embodiments, for a compound of Formula (VII), R¹ is —S(═O)₂tert-butyl.

[0327] In some embodiments, for a compound of Formula (VII), R² is —H, halogen, —OH, —CN, —N(R⁶)₂, —NR⁶C(O)R⁵, —C(O)OR⁵, —C(O)N(R⁶)₂, C₁₋₆alkyl, C₂₋₆alkenyl, C₂₋₆alkynyl, C₃₋₈cycloalkyl, —C₁₋₆alkyl-OH, —C₁₋₆alkyl-OR⁵, —C₁₋₆alkyl-N(R⁶)₂, —O—C₁₋₆alkyl, —O—C₁₋₆alkyl-OH, —O—C₁₋₆alkyl-OR⁵, —O—C₁₋₆alkyl-N(R⁶)₂, or —S(═O)₂R⁵. In some embodiments, for a compound of Formula (VII), R² is —H, C₁₋₆alkyl, C₂₋₆alkenyl, C₂₋₆alkynyl, C₃₋₈cycloalkyl, —O—C₁₋₆alkyl, —O—C₁₋₆alkyl-OH, or —O—C₁₋₆alkyl-OR⁵. In some embodiments, for a compound of Formula (VII), R² is —H or —O—C₁₋₆alkyl. In some embodiments, for a compound of Formula (VII), R² is —H In some embodiments, for a compound of Formula (VII), R² is —OCH₃. In some embodiments, for a compound of Formula (VII), R² is —OCH₂CH₃.

[0328] In some embodiments, for a compound of Formula (VII), R³ is —H, halogen, —NO₂, —CN, —OH, —OR⁵, —SR⁵, —N(R⁶)₂, —S(O)R⁵, —S(═O)₂R⁵, —NR⁶S(═O)₂R⁵, —S(═O)₂N(R⁶)₂, —C(O)R⁵, —C(O)OR⁵, —OC(O)R⁵, —C(O)N(R⁶)₂, —OC(O)N(R⁶)₂, —NR⁶C(O)N(R⁶)₂, —NR⁶C(O)R⁵, —NR⁶C(O)OR⁵, C₁₋₆alkyl, C₂₋₆alkenyl, C₂₋₆alkynyl, C₁₋₆haloalkyl, C₁₋₆heteroalkyl, —O—C₁₋₆alkyl, C₃₋₈cycloalkyl, C₂₋₉heterocycloalkyl, C₂₋₉heteroaryl, 6- to 10-membered aryl, or —O-phenyl, wherein each alkyl, haloalkyl, heteroalkyl, cycloalkyl, heterocycloalkyl, aryl, and heteroaryl is optionally substituted with one or more R⁷. In some embodiments, for a compound of Formula (VII), R³ is —H, halogen, —N(R⁶)₂, —S(═O)₂R⁵, —NR⁶S(═O)₂R⁵, —S(═O)₂N(R⁶)₂, —NR⁶C(O)N(R⁶)₂, —NR⁶C(O)R⁵, —NR⁶C(O)OR⁵, C₁₋₆alkyl, C₁₋₆heteroalkyl, —O—C₁₋₆alkyl, C₃₋₈cycloalkyl, C₂₋₉heterocycloalkyl, C₂₋₉heteroaryl, or 6- to 10-membered aryl, wherein each alkyl, heteroalkyl, cycloalkyl, heterocycloalkyl, ayl, and heteroaryl is optionally substituted with one or more R⁷. In some embodiments, for a compound of Formula (VII), R³ is —H, halogen, —N(R⁶)₂, or C₁₋₆alkyl. In some embodiments, for a compound of Formula (VII), R³ is —H. In some embodiments, for a compound of Formula (VII), R³ is —Cl. In some embodiments, for a compound of Formula (VII), R³ is —F. In some embodiments, for a compound of Formula (VII), R³ is —CH₃.

[0329] In some embodiments a compound of Formula (VII) or a pharmaceutically acceptable salt or isotopic variant thereof has the structure of:

[chemical structure]

[0330] Disclosed herein, in some embodiments, are antagonists or partial antagonists of RIPK2 having a structure of Formula (VIII) or a pharmaceutically acceptable salt or isotopic variant thereof:

[chemical structure]

[0331] wherein:
[0332] HET is

[chemical structure]

[0333] X is N and Y is CH; or
   [0334] X is CH and Y is N;
[0335] R¹ is —H, or —F;
[0336] R² is C₁₋₃alkyl, —Cl, or —F;
[0337] R³ and R⁴ are each independently —H; —OR⁵; —O—C₁₋₆alkyl-O—C₁₋₃alkyl; —O—C₃₋₆cycloalkyl; —C(O)R⁵, C₁₋₆alkyl optionally substituted with one to three —OH, —F, C₃₋₈heterocycloalkyl optionally substituted with oxo, C₃₋₆cycloalkyl, —C(O)OR⁵, —O—C₁₋₆alkyl, aryl, —N(R⁵)(R⁶), —CN, or —C(O)N(R⁵)(R⁶); C₃₋₆cycloalkyl optionally substituted with one to three —OH, one to three —F, C₁₋₆alkyl, —O—C₁₋₆alkyl, C₁₋₆alkyl-OC₁₋₆alkyl, C₁₋₆alkyl-OH, —CF₃, —CN, —OC₃₋₆cycloalkyl, —C(O)OH, —C(O)OR⁵, C₃₋₆cycloalkyl, 5-6 membered heteroaryl, C₃₋₆ heterocycloalkyl, N(R⁵)(R⁶), or —C(O)N(R⁵)(R⁶); —C(O)OR⁵; —C(O)N(R⁵)(R⁶; —S(═O)₂N(R⁵)(R⁶); —S(O), —R⁵; a 4-10 membered monocyclic, bicyclic, or spirocyclic heterocyclyl group containing nitrogen, sulfur, or oxygen and optionally substituted with one to three —N(R⁵)(R⁶), halogen, —C₁₋₆alkyl, —O—C₁₋₆alkyl, or —C₁₋₆haloalkyl; aryl; —N(R⁵)(R⁶); or halogen;
[0338] R⁵ and R⁶ are each independently —H; —C₁₋₆alkyl-C₃-heterocycloalkyl; a 4-6 membered heterocycloalkyl wherein the heterocycloalkyl ring is optionally substituted with one to three C₁₋₆alkyl, —OC₁₋₆alkyl, —C₁₋₆haloalkyl, C₁₋₆cycloalkyl, halogen, acyl, heterocycloalkyl, heterocycloalkyl-C₁₋₆alkyl, heterocycloalkyl-O—C₁₋₆alkyl, heterocydoalkyl-OH, heterocycloalkyl-C(O)CH₃, heterocycloalkyl-C(O)OC₁₋₃alkyl, —C₁₋₆alkyl-heterocycloalkyl, —C₁₋₆alkyl-heterocycloalkyl-C₁₋₆alkyl, —C₁₋₆alkyl-OH, —C₁₋₆alkyl-O—C₁₋₆alkyl, C₃₋₆cycloalkyl, —C₁₋₆alkyl-cycloalkyl, C₃₋₆cycloalkyl-C₁₋₆alkyl, C₃₋₆cycloalkyl-O—C₁₋₆alkyl, or C₃₋₆cycloalkyl-O—C₁₋₆alkyl-OH; acyl; C₃₋₆cycloalkyl-C(O)—C₁₋₃alkyl; —C(O)—C₁₋₃alkyl-O—CH₃; —C(O)—C₁₋₃alkyl; —C(O)—C₃₋₆cycloalkyl; —C(O)—NH—C₁₋₃alkyl; —C(O)—NH—C₁₋₃alkyl; —C(O)—NH—C₃₋₆cycloalkyl optionally monosubstituted or disubstituted with —C₁₋₃alkyl-OH, —C(O)—NH—C₃₋₆heterocyclyl, —C(O)-aryl, —C(O)-heteroaryl, or —S(O)ₙ—C₁₋₃alkyl; and C₁₋₆alkyl optionally substituted with —OH, O—C₁₋₃alkyl, C₃₋₆cycloalkyl, heterocyclyl, aryl, —NH—C₁₋₃alkyl, or —N—(C₁₋₃alkyl)₂; or
   [0339] R⁵ and R⁶ together with the nitrogen atom to which they are attached form a 5-6 membered heterocyclic ring optionally substituted with methyl; and
[0340] n is 0, 1, or 2.

[0341] In some embodiments, for a compound of Formula (VIII), HET is

[chemical structure]

is CH, and n is 1 or 2. In some embodiments, for a compound of Formula (VIII), HET is

[chemical structure]

X is N, Y is CH, R² is —CH₃ or —Cl, R⁴ is H, and n is 2. In some embodiments, for a compound of Formula (VIII), HET is

[chemical structure]

X is N, Y is CH, R² is —CH₃ or —Cl, and n is 2. In some embodiments, for a compound of Formula (VIII), HET is

[chemical structure]

In some embodiments, for a compound of Formula (VIII), HET is

[chemical structure]

X is CH, Y is N, R² is —CH₃ or —Cl, and n is 2. In some embodiments, for a compound of Formula (VIII), HET

[chemical structure]

X is CH, Y is N, R² is —CH₃ or —Cl, R⁴ is —H, and n is 2. In some embodiments, for a compound of Formula (VIII), HET is

[chemical structure]

X is CH, Y is N, R² is —CH₃ or —Cl, R⁴ is —H, and n is 2.

[0342] In some embodiments, for a compound of Formula (VIII), HET is

[chemical structure]

[chemical structure]

X is N, Y is CH, R¹ is —F, and R² is —CH₃. In some embodiments, for a compound of Formula (VIII), HET is

[chemical structure]

X is N, Y is CH, R¹ is —F, and R² is —CH₃. In some embodiments, for a compound of Formula (VIII), HET is

[chemical structure]

X is N, Y is CH, R¹ is —F, and R² is —CH₃.

[0343] In some embodiments, for a compound of Formula (VIII), HET is

[chemical structure]

X is N Y is CH, R² is —CH₃ or —Cl, R⁴ is H, and n is 2. In some embodiments, for a compound f Formula (VIII), HET is

[chemical structure]

X is N, and Y is CH. In some embodiments, for a compound of Formula (VIII), HET is

[chemical structure]

X is CH, and Y is N. In some embodiments, for a compound of Formula (VIII), HET is

[chemical structure]

### X is CH, and Y is N.

[0344] In some embodiments, for a compound of Formula (VIII), HET is

[chemical structure]

[chemical structure]

X is N, Y is CH, R² is —CH₃ or —Cl, R⁴ is H, and n is 2.

[0345] In some embodiments, a compound of Formula (VIII), or a pharmaceutically acceptable salt or isotopic variant thereof, has the structure of:

[chemical structure]

[chemical structure]

[chemical structure]

[0346] Disclosed herein, in some embodiments, are antagonists or partial antagonists of RIPK2 having a structure of Formula (IX), or a pharmaceutically acceptable salt or isotopic variant thereof:

[chemical structure]

[0347] wherein
[0348] R is —H; or
[0349] R is

[chemical structure]

S(═O)₂CH₃,

[chemical structure]

at one available ring position;
[0350] A and D are independently N or CH;
[0351] E is N, CH, or CR;
[0352] B and C are independently N, CH, or C—Cl;
[0353] R¹ is H; or
[0354] R¹ is C—Cl, C—F, C—OCH₃, C—C(CH₃)₃, or C—OH at one available ring position; and
[0355] X-Y are C═C or

[chemical structure]

wherein R² is —H, C₁₋₆alkyl, C₁₋₆alkyl-OH, C₁₋₆alkyl-OC₁₋₆alkyl, or C₁₋₆alkyl-aryl.

[0356] In some embodiments, for a compound of Formula (IX), R² is methyl, ethyl, isobutyl, 2-hydroxyethyl, 2-methoxyethyl, benzyl, or phenethyl. In some embodiments, for a compound of Formula (IX), R² is methyl. In some embodiments, for a compound of Formula (IX), R² is ethyl. In some embodiments, for a compound of Formula (IX), R² is isobutyl. In some embodiments, for a compound of Formula (IX), R² is 2-hydroxyethyl. In some embodiments, for a compound of Formula (IX), R² is 2-methoxyethyl. In some embodiments, for a compound of Formula (IX), R² is benzyl. In some embodiments, for a compound of Formula (IX), R² is phenethyl.

[0357] In some embodiments, a compound of Formula (IX), or a pharmaceutically acceptable salt and isotopic variant thereof, has the structure of:

[chemical structure]

[0358] Disclosed herein, in some embodiments, are antagonists or partial antagonists of RIPK2 having a structure of Formula (IXa) or a pharmaceutically acceptable salt and isotopic variant thereof:

[chemical structure]

[0359] wherein
[0360] R is —H—,

[chemical structure]

S(═O)₂CH₃, or;

[chemical structure]

[0361] R¹ is C₁₋₆alkyl or 6- to 10-membered aryl;
[0362] A and D are independently N or CH;
[0363] E is N, CH, or CR;
[0364] B and C are independently N, CH, or C—C₁;
[0365] R³ is H; or
[0366] R³ is C—Cl, C—F, C—OCH₃, C—C(CH₃)₃, or C—OH at one available ring position; and
[0367] X-Y are C═C or

[chemical structure]

wherein R² is —H, C₁₋₆alkyl, C₁₋₆alkyl-OH, C₁₋₆alkyl-OC₁₋₆alkyl, or C₁₋₆alkyl-aryl.

[0368] In some embodiments, for a compound of Formula (IXa), R¹ is methyl, ethyl, or propyl. In some embodiments, for a compound of Formula (IXa), R¹ is methyl. In some embodiments, for a compound of Formula (IXa), R¹ is ethyl. In some embodiments, for a compound of Formula (IXa), R¹ is propyl.

[0369] In some embodiments, for a compound of Formula (IXa), R² is methyl, ethyl, isobutyl, 2-hydroxyethyl, 2-methoxyethyl, benzyl, or phenethyl. In some embodiments, for a compound of Formula (IXa), R² is methyl. In some embodiments, for a compound of Formula (IXa), R² is ethyl. In some embodiments, for a compound of Formula (IXa), R² is isobutyl. In some embodiments, for a compound of Formula (IXa), R² is 2-hydroxyethyl. In some embodiments, for a compound of Formula (IXa), R² is 2-methoxyethyl. In some embodiments, for a compound of Formula (IXa), R² is benzyl. In some embodiments, for a compound of Formula (IXa), R² is phenethyl.

[0370] Disclosed herein, in some embodiments, are antagonists or partial antagonists of RIPK2 having a structure of Formula (X), or a pharmaceutically acceptable salt or isotopic variant thereof:

[chemical structure]

[0371] wherein
[0372] Cy is C₃₋₈cycloalkyl, C₂₋₉heterocycloalkyl, 6- to 10-membered aryl, or C₂₋₉heteroaryl; Y is absent, —CR^{b}R^{b}—, —O—, —NR^{b}—, or —S(O)ₙ—;
[0373] R¹ is C₃₋₈cycloalkyl, C₂₋₉heterocycloalkyl, 6- to 10-membered aryl, or C₂₋₉heteroaryl, each of which is optionally substituted with one to three R^{a};
[0374] R³ is —H, C₂₋₉heterocycloalkyl, or C₂₋₉heteroaryl, wherein the heterocycloalkyl and heteroaryl are optionally substituted with one to three —F, —Cl, —Br, I, —CN, —NO₂, —OR^{b}, C₁₋₄alkyl, —C₁₋₃alkyl-OR^{b}, —C₁₋₃alkyl-NR^{b}R^{b}, C₁₋₄haloalkyl, C₁₋₄haloalkoxy, C₃₋₈cycloalkyl, —NR^{b}R^{b}, —C(O)NR^{b}R^{b}, —NR^{b}C(O)NR^{b}R^{b}, —S(O)ₙNR^{b}R^{b}, C(O)OR^{b}, —OC(O)OR^{b}, —S(O)ₙR^{b}, —NR^{b}S(O)˜R^{b}, —C(S)OR^{b}, —OC(S)R^{b}, —NR^{b}C(O)R^{b}, —C(S)NR^{b}R^{b}, —NR^{b}C(S)R^{b}, —NR^{b}C(O)OR^{b}, —OC(O)NR^{b}R^{b}, —NR^{b}C(S)OR^{b}, —OC(S)NR^{b}R^{b}, —NRC(S)NR^{b}R^{b}, —C(S)R^{b}, or —C(O)R^{b};
[0375] each R⁴ is independently halogen, —CN, —NR^{b}R^{b}, —OR^{b}, C₁₋₄alkyl, —C₁₋₃alkyl-OR^{b}, —C₁₋₃alkyl-NR^{b}R^{b}, C₁₋₄haloalkyl, or C₁₋₄haloalkoxy;
   [0376] each R^{a} is independently —F, —Cl, —Br, I, —CN, OR^{b}, C₁₋₄alkyl, C₂₋₆alkenyl, C₂₋₆alkynyl, C₁₋₄haloalkyl, C₁₋₄haloalkoxy, —C₁₋₃alkyl-OR^{b}, or —C₁₋₆alkyl-NR^{b}R^{b};
   [0377] each R^{b} is independently —H or C₁₋₄alkyl;
[0378] x is 0, 1, 2, 3, or 4;
[0379] each m is independently 0, 1, 2, or 3; and
[0380] each n is independently 0, 1, or 2.

[0381] Disclosed herein, in some embodiments, are antagonists or partial antagonists of RIPK2 having a structure of Formula (Xa) or a pharmaceutically acceptable salt or isotopic variant thereof:

[chemical structure]

[0382] Disclosed herein, in some embodiments, are antagonists or partial antagonists of RIPK2 having a structure of Formula (Xb) or a pharmaceutically acceptable salt or isotopic variant thereof:

[chemical structure]

[0383] In some embodiments, for a compound of Formula (X), R¹ is optionally substituted phenyl, optionally substituted cyclopentyl, optionally substituted cyclohexyl, optionally substituted thienyl, optionally substituted pyridinyl, optionally substituted thiazolyl, optionally substituted pyrrolyl, optionally substituted imidazolyl, optionally substituted furanyl, optionally substituted oxazolyl, optionally substituted isoxazolyl, optionally substituted pyrazolyl, optionally substituted isothiazolyl, optionally substituted pyrmidinyl, optionally substituted pyrazinyl, optionally substituted pyridazinyl, optionally substituted oxadiazolyl, optionally substituted tetrahydropyranyl, optionally substituted triazolyl, or optionally substituted thiadiazolyl. In some embodiments, for a compound of Formula (X), R¹ is optionally substituted phenyl, optionally substituted cyclopentyl, optionally substiuted thienyl, or optionally substituted tetrahydropyranyl. In some embodiments, for a compound of Formula (X), R¹ is optionally substituted phenyl. In some embodiments, for a compound of Formula (X), R¹ is optionally substituted cyclopentyl. In some embodiments, for a compound of Formula (X), R¹ is optionally substituted thienyl. In some embodiments, for a compound of Formula (X), R¹ is optionally substituted tetrahydropyranyl.

[0384] In some embodiments, for a compound of Formula (X), R³ is optionally substituted monocyclic heterocycloalkyl or optionally substituted monocyclic heteroaryl. In some embodiments, for a compound of Formula (X), R³ is optionally substituted monocyclic heterocycloalkyl. In some embodiments, for a compound of Formula (X), R³ is optionally substituted monocyclic heterocycloaryl.

[0385] In some embodiments, for a compound of Formula (X), m is 0 to 3. In some embodiments, for a compound of Formula (X), m is 0. In some embodiments, for a compound of Formula (X), m is 1. In some embodiments, for a compound of Formula (X), m is 2. In some embodiments, for a compound of Formula (X), m is 3.

[0386] In some embodiments, for a compound of Formula (X), R³ is optionally substituted azetidinyl, optionally substituted morpholinyl, optionally substituted piperazinyl, optionally substituted piperidinyl, optionally substituted tetrahydropyranyl, optionally substituted pyrrolidinyl, optionally substituted thiomorpholinyl, optionally substituted tetrahydrofuryanyl, optionally substituted homomorpholinyl, optionally substituted homopiperazinyl, optionally substituted thiomorpholine dioxide, or optionally substituted thienomorpholine oxide. In some embodiments, for a compound of Formula (X), R³ is optionally substituted morpholinyl, optionally substituted piperazinyl, optionally substituted piperidinyl, or optionally substituted thiomorpholinyl. In some embodiments, for a compound of Formula (X), R³ is optionally substituted morpholinyl. In some embodiments, for a compound of Formula (X), R³ is optionally substituted piperazinyl. In some embodiments, for a compound of Formula (X), R³ is optionally substituted piperidinyl. In some embodiments, for a compound of Formula (X), R³ is optionally substituted thiomorpholinyl.

[0387] Disclosed herein, in some embodiments, are antagonists or partial antagonists of RIPK2 having a structure of Formula (Xc) or a pharmaceutically acceptable salt or isotopic variant thereof:

[chemical structure]

[0388] wherein
[0389] R⁵ is C₁₋₄alkyl or —C₁₋₃alkyl-OR^{b}.

[0390] Disclosed herein, in some embodiments, are antagonists or partial antagonists of RIPK2 having a structure of Formula (Xd) or a pharmaceutically acceptable salt or isotopic variant thereof:

[chemical structure]

[0391] wherein:
[0392] Y is absent or —CH₂—; and
[0393] Y is attached to the meta or para position of the phenyl ring.

[0394] Disclosed herein, in some embodiments, are antagonists or partial antagonists of RIPK2 having a structure of Formula (Xe) or a pharmaceutically acceptable salt or isotopic variant thereof:

[chemical structure]

[0395] wherein
[0396] R⁵ is —H, C₁₋₄alkyl, or —C₁₋₃alkyl-OR^{b};
[0397] Y is absent or —CH₂—; and
[0398] Y is attached to the meta or para position of the phenyl ring.

[0399] In some embodiments, for a compound of Formula (X), R¹ is

[chemical structure]

In some embodiments, for a compound of Formula (X), R¹ is

[chemical structure]

wherein each R^{a} is independently —F, —Cl, or —CH₃.

### GPR35 Modulators

[0400] Disclosed herein are therapeutic agents that modulate G-Protein Coupled Receptor 35 (GPR35) (“GPR35 modulator”). In some instances, the GPR35 modulator is an agonist or partial agonist. In some instances, the GPR35 modulator is an antagonist, partial antagonist, or inverse agonist. The GPR35 modulator may be a small molecule. In some instances, the therapeutic agent is a small molecule that binds GPR35. In some instances, the small molecule that binds GPR35 is a GPR35 agonist. In some instances, the small molecule that binds GPR35 is a GPR35 partial agonist In some instances, the small molecule that binds GPR35 is a GPR35 antagonist. In some instances, the small molecule that binds GPR35 is a GPR35 partial agonist.

[0401] In some instances, the small molecule that binds GPR35 is a compound of Formula (I):

[chemical structure]

[0402] wwherein.
[0403] X¹ and X² are independently selected from N and CR¹⁴;
[0404] R¹ is —CH₂R⁴, —CN, —B(OH)₂, —N(R¹⁰)₂, —NR¹⁰C(O)R⁹, —C(O)OH, —CH₂C(O)OH, —C(O)N(R¹⁰)₂, —C(O)NHS(O)₂N(R¹⁰)₂, —C₁₋₆alkyl-OH, C₃₋₈cycloalkyl,

[chemical structure]

or a5- or 6-membered heteroaryl optionally substituted with one, two, or three R⁸ groups;
[0405] R² is H, —OH, —N(R¹⁰)₂, —NHS(O)₂R⁹, —S(O)₂N(R¹⁰)₂, —C(O)N(R¹⁰)₂, OC(O)N(R¹⁰)₂, —O—C₁₋₆alkyl, —C₁₋₆alkyl-OH, —C₁₋₆alkyl-OR⁹, —C₁₋₆alkyl-N(R¹⁰)₂, C₂₋₆alkenyl, C₂₋₆alkynyl, C₁₋₆haloalkyl, C₃₋₈cycloalkyl;
[0406] each R³ is independently selected from halogen, —CN, —OH, —OR⁹, —SR⁹, —N(R¹⁰)₂, —S(O)R⁹, —S(O)₂R⁹, —NHS(O)₂R⁹, —S(O)₂N(R¹⁰)₂, —C(O)R⁹, —C(O)OR¹⁰, —OC(O)R⁹, —C(O)N(R¹⁰)₂, —OC(O)N(R¹⁰)₂, —NR¹⁰C(O)N(R¹⁰)₂, —NR¹⁰C(O)R⁹, —NR¹⁰C(O)OR⁹, C₁₋₆alkyl, —C₁₋₆alkyl-OH, —C₁₋₆alkyl-OR⁹, —C₁₋₆alkyl-N(R¹⁰)₂, C₂₋₆alkenyl, C₂₋₆alkynyl, C₁₋₆haloalkyl, C₃₋₈cycloalkyl, and —C₁₋₆alkyl-C₃₋₈cycloalkyl;
[0407] R⁴ is

[chemical structure]

[0408] each R⁵ is independently selected from halogen, —CN, —OH, —OR⁹, —SR⁹, —N(R¹⁰)₂, —S(O)R⁹, —S(O)₂R⁹, —NHS(O)₂R⁹, —S(O)₂N(R¹⁰)₂, —C(O)NHS(O)₂N(R¹⁰)₂, —C(O)R⁹, —C(O)OR¹⁰, —OC(O)R⁹, —C(O)N(R¹⁰)₂, —OC(O)N(R¹⁰)₂, —NR¹⁰C(O)N(R¹⁰)₂, —NR¹⁰C(O)R⁹, —NR¹⁰C(O)OR⁹, C₁₋₆alkyl, —C₁₋₆alkyl-OH, —C₁₋₆alkyl-OR⁹, —C₁₋₆alkyl-N(R¹⁰)₂, —C₁₋₆alkyl-C(O)OR¹⁰, C₂₋₆alkenyl, C₂₋₆alkynyl, C₁₋₆haloalkyl, C₁₋₆haloalkyl-OH, C₃₋₈cycloalkyl, —C₁₋₆alkyl-C₃₋₈cycloalkyl, phenyl, —C₁₋₆alkyl-phenyl, C₂₋₉heterocycloalkyl, and C₁₋₉heteroaryl; wherein phenyl, —C₁₋₆alkyl-phenyl, and C₁₋₉heteroaryl are optionally substituted with one, two, or three groups independently selected from halogen, C₁₋₆alkyl, C₁₋₆haloalkyl, C₃₋₈cycloalkyl, and C₂₋₉heterocycloalkyl; and wherein C₂₋₉heterocycloalkyl is optionally substituted with one, two, or three groups independently selected from halogen, C₁₋₆alkyl, C₁₋₆haloalkyl, and oxo;
[0409] R⁶ is —C(O)OR⁷, —C(O)NHS(O)₂N(R¹⁰)₂,

[chemical structure]

[0410] each R⁷ is independently selected from H and C₁₋₆alkyl;
[0411] each R⁸ is independently selected from halogen, —OH, —OR⁹, —N(R¹⁰)₂, —S(O)R⁹, —S(O)₂R⁹, —NHS(O)₂R⁹, —S(O)₂N(R¹⁰)₂, —C(O)NHS(O)₂N(R¹⁰)₂, —C(O)R⁹, —C(O)OR¹⁰, —OC(O)R⁹, —C(O)N(R¹⁰)₂, —OC(O)N(R¹⁰)₂, —NR¹⁰C(O)N(R¹⁰)₂, —NR¹⁰C(O)R⁹, —NR¹⁰C(O)OR⁹, C₁₋₆alkyl, —C₁₋₆alkyl-OH, —C₁₋₆alkyl-OR⁹, —C₁₋₆alkyl-N(R¹⁰)₂, —C₁₋₆alkyl-C(O)OR¹⁰, C₁₋₆haloalkyl, C₁₋₆haloalkyl-OH, C₃₋₈cycloalkyl, —C₁₋₆alkyl-C₃₋₈cycloalkyl, phenyl, —C₁₋₆alkyl-phenyl, C₂₋₉heterocycloalkyl, and C₁₋₉heteroaryl; wherein phenyl, —C₁₋₆alkyl-phenyl, and C₁₋₉heteroaryl are optionally substituted with one, two, or three groups independently selected from halogen, C₁₋₆alkyl, C₁₋₆haloalkyl, C₃₋₈cycloalkyl, and C₂₋₉heterocycloalkyl; and wherein C₂₋₉heterocycloalkyl is optionally substituted with one, two, or three groups independently selected from halogen, C₁₋₆alkyl, C₁₋₆haloalkyl, and oxo;
[0412] each R⁹ is independently selected from C₁₋₆alkyl, C₁₋₆haloalkyl, C₃₋₈cycloalkyl, —C₁₋₆alkyl-C₃₋₈cycloalkyl, phenyl, —C₁₋₆alkyl-phenyl, C₂₋₉heterocycloalkyl, —C₁₋₆alkyl-C₂₋₉heterocycloalkyl, C₂₋₉heteroaryl, and —C₁₋₆alkyl-C₂₋₉heteroaryl, wherein C₁₋₆alkyl, phenyl, —C₁₋₆alkyl-phenyl, —C₁₋₆alkyl-C₂₋₉heterocycloalkyl, C₂₋₉heteroaryl, and —C₁₋₆alkyl-C₂₋₉heteroaryl are optionally substituted with one or two groups independently selected from C₁₋₆alkyl, —OR¹¹, —N(R¹¹)₂, C₁₋₆alkyl, C₃₋₈cycloalkyl, —C(O)R¹², and —C(O)OR¹²;
[0413] each R¹⁰ is independently selected from H, C₁₋₆alkyl, C₁₋₆haloalkyl, C₃₋₈cycloalkyl, —C₁₋₆alkyl-C₃₋₈cycloalkyl, phenyl, —C₁₋₆alkyl-phenyl, and C₂₋₉heteroaryl, wherein C₁₋₆alkyl, phenyl, —C₁₋₆alkyl-phenyl, and C₂₋₉heteroaryl are optionally substituted with one or two groups independently selected from halogen, C₁₋₆alkyl, —N(R¹¹)₂, and —C(O)OR¹²; or two R¹⁰ and the nitrogen atom to which they are attached are combined to form a 5- or 6-membered heterocycloalkyl ring optionally substituted with one, two, or three groups independently selected from C₁₋₆alkyl, oxo, and —C(O)OH;
[0414] each R¹¹ is independently selected from H and C₁₋₆alkyl;
[0415] R¹² is independently selected from H and C₁₋₆alkyl;
[0416] R¹³ is selected from H, C₁₋₆alkyl, C₁₋₆haloalkyl, C₃₋₈cycloalkyl, —C₁₋₆alkyl-C₃₋₈cycloalkyl, phenyl, —C₁₋₆alkyl-phenyl, and C₂₋₉heteroaryl;
[0417] each R¹⁴ is independently selected from C₁₋₆alkyl, C₁₋₆haloalkyl, C₃₋₈cycloalkyl, —C₁₋₆alkyl-C₃₋₈cycloalkyl, phenyl, —C₁₋₆alkyl-phenyl, C₂₋₉heterocycloalkyl, —C₁₋₆alkyl-C₂₋₉heterocycloalkyl, C₂₋₉heteroaryl, and —C₁₋₆alkyl-C₂₋₉heteroaryl;
[0418] n is 0, 1, 2, or 3;
[0419] p is 0, 1, 2, 3, 4, or 5; and
[0420] q is 0, 1, 2, 3, or 4;

[0421] or a pharmaceutically acceptable salt or solvate thereof.

[0422] In some instances, the small molecule that binds GPR35 is a compound of Formula (II):

[chemical structure]

[0423] wherein:
[0424] X¹, X², Y¹, and Y² are independently selected from O, NR¹³, and C(R¹⁴)₂;
[0425] R¹ and R² are independently selected from —S(O)R⁹, —S(O)₂R⁹, —NHS(O)₂R⁹, —S(O)₂N(R¹⁰)₂, —C(O)R⁹, —C(O)OR¹⁰, —OC(O)R⁹, —C(O)N(R¹⁰)₂, —OC(O)N(R¹⁰)₂, —NR¹⁰C(O)N(R¹⁰)₂, —NR¹⁰C(O)R⁹, —NR¹⁰C(O)OR⁹, C₁₋₆alkyl, —C₁₋₆alkyl-OH, —C₁₋₆alkyl-OR⁹, and —C₁₋₆alkyl-N(R¹⁰)₂;
[0426] R³ is selected from —OH, —OR⁹, —SR⁹, —N(R¹⁰)₂, —S(O)R⁹, —S(O)₂R⁹, —NHS(O)₂R⁹, —S(O)₂N(R¹⁰)₂, —C(O)R⁹, —C(O)OR¹⁰, —OC(O)R⁹, —C(O)N(R¹⁰)₂, —OC(O)N(R¹⁰)₂, —NR¹⁰C(O)N(R¹⁰)₂, —NR¹⁰C(O)R⁹, —NR¹⁰C(O)OR⁹, C₁₋₆alkyl, —C₁₋₆alkyl-OH, —C₁₋₆alkyl-OR⁹, —C₁₋₆alkyl-N(R¹⁰)₂, C₂₋₆alkenyl, C₂₋₆alkynyl, C₁₋₆haloalkyl, C₃₋₈cycloalkyl, and —C₁₋₆alkyl-C₃₋₈cycloalkyl;
[0427] each R⁴ and R⁵ is independently selected from halogen, —CN, —OH, —OR⁹, —SR⁹, —N(R¹⁰)₂, —S(O)R⁹, —S(O)₂R⁹, —NHS(O)₂R⁹, —S(O)₂N(R¹⁰)₂, —C(O)R⁹, —C(O)OR¹⁰, —OC(O)R⁹, —C(O)N(R¹⁰)₂, —OC(O)N(R¹⁰)₂, —NR¹⁰C(O)N(R¹⁰)₂, —NR¹⁰C(O)R⁹, —NR¹⁰C(O)OR⁹, C₁₋₆alkyl, —C₁₋₆alkyl-OH, —C₁₋₆alkyl-OR⁹, —C₁₋₆alkyl-N(R¹⁰)₂, C₂₋₆alkenyl, C₂₋₆alkynyl, C₁₋₆haloalkyl, C₃₋₈cycloalkyl, and —C₁₋₆alkyl-C₃₋₈cycloalkyl;
[0428] each R⁹ is independently selected from C₁₋₆alkyl, C₁₋₆haloalkyl, C₃₋₈cycloalkyl, —C₁₋₆alkyl-C₃₋₈cycloalkyl, phenyl, —C₁₋₆alkyl-phenyl, C₂₋₉heterocycloalkyl, —C₁₋₆alkyl-C₂₋₉heterocycloalkyl, C₂₋₉heteroaryl, and —C₁₋₆alkyl-C₂₋₉heteroaryl, wherein C₁₋₆alkyl, phenyl, —C₁₋₆alkyl-phenyl, —C₁₋₆alkyl-C₂₋₉heterocycloalkyl, C₂₋₉heteroaryl, and —C₁₋₆alkyl-C₂₋₉heteroaryl are optionally substituted with one or two groups independently selected from C₁₋₆alkyl, —OR¹¹, —N(R¹¹)₂, C₁₋₆alkyl, C₃₋₈cycloalkyl, —C(O)R¹², and —C(O)OR¹²;
[0429] each R¹⁰ is independently selected from H, C₁₋₆alkyl, C₁₋₆haloalkyl, C₃₋₈cycloalkyl, —C₁₋₆alkyl-C₃₋₈cycloalkyl, phenyl, —C₁₋₆alkyl-phenyl, and C₂₋₉heteroaryl, wherein C₁₋₆alkyl, phenyl, —C₁₋₆alkyl-phenyl, and C₂₋₉heteroaryl are optionally substituted with one or two groups independently selected from halogen, C₁₋₆alkyl, and —N(R¹¹)₂; or two R¹⁰ and the nitrogen atom to which they are attached are combined to form a 5- or 6-membered heterocycloalkyl ring optionally substituted with one, two, or three groups independently selected from C₁₋₆ alkyl, oxo, and —C(O)OH;
[0430] each R¹¹ is independently selected from H and C₁₋₆alkyl;
[0431] each R¹² is independently selected from H and C₁₋₆alkyl;
[0432] each R¹³ is independently selected from H, C₁₋₆alkyl, C₁₋₆haloalkyl, C₃₋₈cycloalkyl, —C₁₋₆alkyl-C₃₋₈cycloalkyl, phenyl, —C₁₋₆alkyl-phenyl, and C₂₋₉heteroaryl;
[0433] each R¹⁴ is independently selected from H, C₁₋₆alkyl, C₁₋₆haloalkyl, C₃₋₈cycloalkyl, —C₁₋₆alkyl-C₃₋₈cycloalkyl, phenyl, —C₁₋₆alkyl-phenyl, C₂₋₉heterocycloalkyl, —C₁₋₆alkyl-C₂₋₉heterocycloalkyl, C₂₋₉heteroaryl, and —C₁₋₆alkyl-C₂₋₉heteroaryl;
[0434] m is 1, 2, 3, 4, or 5;
[0435] n is 1, 2, 3, 4, or 5;
[0436] p is 0, 1, 2, or 3; and
[0437] q is 0, 1, 2, or 3;

[0438] or a pharmaceutically acceptable salt or solvate thereof.

[0439] In some instances, the small molecule that binds GPR35 is a compound of Formula (III):

[chemical structure]

[0440] wherein:
[0441] X¹ and X² are independently selected from O, NR¹³, and C(R¹⁴)₂;
[0442] R¹ and R² are independently selected from —S(O)R⁹, —S(O)₂R⁹, —NHS(O)₂R⁹, —S(O)₂N(R¹⁰)₂, —C(O)R⁹, —C(O)OR¹⁰, —OC(O)R⁹, —C(O)N(R¹⁰)₂, —OC(O)N(R¹⁰)₂, —NR¹⁰C(O)N(R¹⁰)₂, —NR¹⁰C(O)R⁹, —NR¹⁰C(O)OR⁹, C₁₋₆alkyl, —C₁₋₆alkyl-OH, —C₁₋₆alkyl-OR⁹, and —C₁₋₆alkyl-N(R¹⁰)₂.
[0443] R³ and R⁴ are independently selected from H, halogen, —CN, —OH, —OR⁹, —SR⁹, —N(R¹⁰)₂, —S(O)R⁹, —S(O)₂R⁹, —NHS(O)₂R⁹, —S(O)₂N(R¹⁰)₂, —C(O)R⁹, —C(O)OR¹⁰, —OC(O)R⁹, —C(O)N(R¹⁰)₂, —OC(O)N(R¹⁰)₂, —NR¹⁰C(O)N(R¹⁰)₂, —NR¹⁰C(O)R⁹, —NR¹⁰C(O)OR⁹, C₁₋₆alkyl, —C₁₋₆alkyl-OH, —C₁₋₆alkyl-OR⁹, —C₁₋₆alkyl-N(R¹⁰)₂, C₂₋₆alkenyl, C₂₋₆alkynyl, C₁₋₆haloalkyl, C₃₋₈cycloalkyl, and —C₁₋₆alkyl-C₃₋₈cycloalkyl;
[0444] each R⁹ is independently selected from C₁₋₆alkyl, C₁₋₆haloalkyl, C₃₋₈cycloalkyl, —C₁₋₆alkyl-C₃₋₈cycloalkyl, phenyl, —C₁₋₆alkyl-phenyl, C₂₋₉heterocycloalkyl, —C₁₋₆alkyl-C₂₋₉heterocycloalkyl, C₂₋₉heteroaryl, and —C₁₋₆alkyl-C₂₋₉heteroaryl, wherein C₁₋₆alkyl, phenyl, —C₁₋₆alkyl-phenyl, —C₁₋₆alkyl-C₂₋₉heterocycloalkyl, C₂₋₉heteroaryl, and —C₁₋₆alkyl-C₂₋₉heteroaryl are optionally substituted with one or two groups independently selected from C₁₋₆alkyl, —OR¹, —N(R¹¹)₂, C₁₋₆alkyl, C₃₋₈cycloalkyl, —C(O)R¹², and —C(O)OR¹²;
[0445] each R¹⁰ is independently selected from H, C₁₋₆alkyl, C₁₋₆haloalkyl, C₃₋₈cycloalkyl, —C₁₋₆alkyl-C₃₋₈cycloalkyl, phenyl, —C₁₋₆alkyl-phenyl, and C₂₋₉heteroaryl, wherein C₁₋₆alkyl, phenyl, —C₁₋₆alkyl-phenyl, and C₂₋₉heteroaryl are optionally substituted with one or two groups independently selected from halogen, C₁₋₆alkyl, and —N(R¹¹)₂; or two R¹⁰ and the nitrogen atom to which they are attached are combined to form a 5- or 6-membered heterocycloalkyl ring optionally substituted with one, two, or three groups independently selected from C₁₋₆alkyl, oxo, and —C(O)OH;
[0446] each R¹¹ is independently selected from H and C₁₋₆alkyl;
[0447] each R¹² is independently selected from H and C₁₋₆alkyl;
[0448] each R¹³ is independently selected from H, C₁₋₆alkyl, C₁₋₆haloalkyl, C₃₋₈cycloalkyl, —C₁₋₆alkyl-C₃₋₈cycloalkyl, phenyl, —C₁₋₆alkyl-phenyl, and C₂₋₉heteroaryl; and
[0449] each R¹⁴ is independently selected from H, C₁₋₆alkyl, C₁₋₆haloalkyl, C₃₋₈cycloalkyl, —C₁₋₆alkyl-C₃₋₈cycloalkyl, phenyl, —C₁₋₆alkyl-phenyl, C₂₋₉heterocycloalkyl, —C₁₋₆alkyl-C₂₋₉heterocycloalkyl, C₂₋₉heteroaryl, and —C₁₋₆alkyl-C₂₋₉heteroaryl;

[0450] or a pharmaceutically acceptable salt or solvate thereof.

[0451] In some instances, the small molecule that binds GPR35 is a compound of Formula (IV):

[chemical structure]

[0452] wherein:
[0453] X¹ and X² are independently selected from O, NR¹³, and C(R¹⁴)₂;
[0454] R¹ and R² are independently selected from —S(O)R⁹, —S(O)₂R⁹, —NHS(O)₂R⁹, —S(O)₂N(R¹⁰)₂, —C(O)R⁹, —C(O)OR¹⁰, —OC(O)R⁹, —C(O)N(R¹⁰)₂, —OC(O)N(R¹⁰)₂, —NR¹⁰C(O)N(R¹⁰)₂, —NR¹⁰C(O)R⁹, —NR¹⁰C(O)OR⁹, C₁₋₆alkyl, —C₁₋₆alkyl-OH, —C₁₋₆alkyl-OR⁹, and —C₁₋₆alkyl-N(R¹⁰)₂.
[0455] R³ and R⁴ are independently selected from H, halogen, —CN, —OH, —OR⁹, —SR⁹, —N(R¹⁰)₂, —S(O)R⁹, —S(O)₂R⁹, —NHS(O)₂R⁹, —S(O)₂N(R¹⁰)₂, —C(O)R⁹, —C(O)OR¹⁰, —OC(O)R⁹, —C(O)N(R¹⁰)₂, —OC(O)N(R¹⁰)₂, —NR¹⁰C(O)N(R¹⁰)₂, —NR¹⁰C(O)R⁹, —NR¹⁰C(O)OR⁹, C₁₋₆alkyl, —C₁₋₆alkyl-OH, —C₁₋₆alkyl-OR⁹, —C₁₋₆alkyl-N(R¹⁰)₂, C₂₋₆alkenyl, C₂₋₆alkynyl, C₁₋₆haloalkyl, C₃₋₈cycloalkyl, and —C₁₋₆alkyl-C₃₋₈cycloalkyl;
[0456] each R⁹ is independently selected from C₁₋₆alkyl, C₁₋₆haloalkyl, C₃₋₈cycloalkyl, —C₁₋₆alkyl-C₃₋₈cycloalkyl, phenyl, —C₁₋₆alkyl-phenyl, C₂₋₉heterocycloalkyl, —C₁₋₆alkyl-C₂₋₉heterocycloalkyl, C₂₋₉heteroaryl, and —C₁₋₆alkyl-C₂₋₉heteroaryl, wherein C₁₋₆alkyl, phenyl, —C₁₋₆alkyl-phenyl, —C₁₋₆alkyl-C₂₋₉heterocycloalkyl, C₂₋₉heteroaryl, and —C₁₋₆alkyl-C₂₋₉heteroaryl are optionally substituted with one or two groups independently selected from C₁₋₆alkyl, —OR¹, —N(R¹¹)₂, C₁₋₆alkyl, C₃₋₈cycloalkyl, —C(O)R¹², and —C(O)OR¹²;
[0457] each R¹⁰ is independently selected from H, C₁₋₆alkyl, C₁₋₆haloalkyl, C₃₋₈cycloalkyl, —C₁₋₆alkyl-C₃₋₈cycloalkyl, phenyl, —C₁₋₆alkyl-phenyl, and C₂₋₉heteroaryl, wherein C₁₋₆alkyl, phenyl, —C₁₋₆alkyl-phenyl, and C₂₋₉heteroaryl are optionally substituted with one or two groups independently selected from halogen, C₁₋₆alkyl, and —N(R¹¹)₂; or two R¹⁰ and the nitrogen atom to which they are attached are combined to form a 5- or 6-membered heterocycloalkyl ring optionally substituted with one, two, or three groups independently selected from C₁₋₆alkyl, oxo, and —C(O)OH;
[0458] each R¹¹ is independently selected from H and C₁₋₆alkyl;
[0459] each R¹² is independently selected from H and C₁₋₆alkyl;
[0460] each R¹³ is independently selected from H, C₁₋₆alkyl, C₁₋₆haloalkyl, C₃₋₈cycloalkyl, —C₁₋₆alkyl-C₃₋₈cycloalkyl, phenyl, —C₁₋₆alkyl-phenyl, and C₂₋₉heteroaryl; and
[0461] each R¹⁴ is independently selected from H, C₁₋₆alkyl, C₁₋₆haloalkyl, C₃₋₈cycloalkyl, —C₁₋₆alkyl-C₃₋₈cycloalkyl, phenyl, —C₁₋₆alkyl-phenyl, C₂₋₉heterocycloalkyl, —C₁₋₆alkyl-C₂₋₉heterocycloalkyl, C₂₋₉heteroaryl, and —C₁₋₆alkyl-C₂₋₉heteroaryl;

[0462] or a pharmaceutically acceptable salt or solvate thereof.

[0463] In some instances, the small molecule that binds GPR35 is a compound of Formula (V):

[chemical structure]

[0464] wherein:
[0465] R¹ and R² are independently selected from H, C₁₋₆alkyl, C₁₋₆haloalkyl, C₃₋₈cycloalkyl, —C₁₋₆alkyl-C₃₋₈cycloalkyl, phenyl, —C₁₋₆alkyl-phenyl, and C₂₋₉heteroaryl;
[0466] each R³ is independently selected from halogen, —CN, —OH, —OR⁹, —SR⁹, —N(R¹⁰)₂, —S(O)R⁹, —S(O)₂R⁹, —NHS(O)₂R⁹, —S(O)₂N(R¹⁰)₂, —C(O)R⁹, —C(O)OR¹⁰, —OC(O)R⁹, —C(O)N(R¹⁰)₂, —OC(O)N(R¹⁰)₂, —NR¹⁰C(O)N(R¹⁰)₂, —NR¹⁰C(O)R⁹, —NR¹⁰C(O)OR⁹, C₁₋₆alkyl, —C₁₋₆alkyl-OH, —C₁₋₆alkyl-OR⁹, —C₁₋₆alkyl-N(R¹⁰)₂, C₂₋₆alkenyl, C₂₋₆alkynyl, C₁₋₆haloalkyl, C₃₋₈cycloalkyl, and —C₁₋₆alkyl-C₃₋₈cycloalkyl;
[0467] each R⁹ is independently selected from C₁₋₆alkyl, C₁₋₆haloalkyl, C₃₋₈cycloalkyl, —C₁₋₆alkyl-C₃₋₈cycloalkyl, phenyl, —C₁₋₆alkyl-phenyl, C₂₋₉heterocycloalkyl, —C₁₋₆alkyl-C₂₋₉heterocycloalkyl, C₂₋₉heteroaryl, and —C₁₋₆alkyl-C₂₋₉heteroaryl, wherein C₁₋₆alkyl, phenyl, —C₁₋₆alkyl-phenyl, —C₁₋₆alkyl-C₂₋₉heterocycloalkyl, C₂₋₉heteroaryl, and —C₁₋₆alkyl-C₂₋₉heteroaryl are optionally substituted with one or two groups independently selected from C₁₋₆alkyl, —OR¹, —N(R¹¹)₂, C₁₋₆ alkyl, C₃₋₈cycloalkyl, —C(O)R¹², and —C(O)OR¹²;
[0468] each R¹⁰ is independently selected from H, C₁₋₆alkyl, C₁₋₆haloalkyl, C₃₋₈cycloalkyl, —C₁₋₆alkyl-C₃₋₈cycloalkyl, phenyl, —C₁₋₆alkyl-phenyl, and C₂₋₉heteroaryl, wherein C₁₋₆alkyl, phenyl, —C₁₋₆alkyl-phenyl, and C₂₋₉heteroaryl are optionally substituted with one or two groups independently selected from halogen, C₁₋₆alkyl, and —N(R¹¹)₂; or two R¹⁰ and the nitrogen atom to which they are attached are combined to form a 5- or 6-membered heterocycloalkyl ring optionally substituted with one, two, or three groups independently selected from C₁₋₆alkyl, oxo, and —C(O)OH;
[0469] each R¹¹ is independently selected from H and C₁₋₆alkyl;
[0470] each R¹² is independently selected from H and C₁₋₆alkyl; and
[0471] p is 0, 1, 2, 3, or 4;

[0472] or a pharmaceutically acceptable salt or solvate thereof.

[0473] In some instances, the small molecule that binds GPR35 is a compound of Formula (VI):

[chemical structure]

[0474] wherein:
[0475] X is selected from O, NR¹³, and C(R¹⁴)₂;
[0476] R¹ and R² are independently selected from —S(O)R⁹, —S(O)₂R⁹, —NHS(O)₂R⁹, —S(O)₂N(R¹⁰)₂, —C(O)R⁹, —C(O)OR¹⁰, —OC(O)R⁹, —C(O)N(R¹⁰)₂, —OC(O)N(R¹⁰)₂, —NR¹⁰C(O)N(R¹⁰)₂, —NR¹⁰C(O)R⁹, —NR¹⁰C(O)OR⁹, C₁₋₆alkyl, —C₁₋₆alkyl-OH, —C₁₋₆alkyl-OR⁹, and —C₁₋₆alkyl-N(R¹⁰)₂.
[0477] R³ and R⁴ are independently selected from H, halogen, —CN, —OH, —OR⁹, —SR⁹, —N(R¹⁰)₂, —S(O)R⁹, —S(O)₂R⁹, —NHS(O)₂R⁹, —S(O)₂N(R¹⁰)₂, —C(O)R⁹, —C(O)OR¹⁰, —OC(O)R⁹, —C(O)N(R¹⁰)₂, —OC(O)N(R¹⁰)₂, —NR¹⁰C(O)N(R¹⁰)₂, —NR¹⁰C(O)R⁹, —NR¹⁰C(O)OR⁹, C₁₋₆alkyl, —C₁₋₆alkyl-OH, —C₁₋₆alkyl-OR⁹, —C₁₋₆alkyl-N(R¹⁰)₂, C₂₋₆alkenyl, C₂₋₆alkynyl, C₁₋₆haloalkyl, C₃₋₈cycloalkyl, and —C₁₋₆alkyl-C₃₋₈cycloalkyl;
[0478] each R⁵ and each R⁶ is independently selected from halogen, —CN, —OH, —OR⁹, —SR⁹, —N(R¹⁰)₂, —S(O)R⁹, —S(O)₂R⁹, —NHS(O)₂R⁹, —S(O)₂N(R¹⁰)₂, —C(O)R⁹, —C(O)OR¹⁰, —OC(O)R⁹, —C(O)N(R¹⁰)₂, —OC(O)N(R¹⁰)₂, —NR¹⁰C(O)N(R¹⁰)₂, —NR¹⁰C(O)R⁹, —NR¹⁰C(O)OR⁹, C₁₋₆alkyl, —C₁₋₆alkyl-OH, —C₁₋₆alkyl-OR⁹, —C₁₋₆alkyl-N(R¹⁰)₂, C₂₋₆alkenyl, C₂₋₆alkynyl, C₁₋₆haloalkyl, C₃₋₈cycloalkyl, and —C₁₋₆alkyl-C₃₋₈cycloalkyl;
[0479] each R⁹ is independently selected from C₁₋₆alkyl, C₁₋₆haloalkyl, C₃₋₈cycloalkyl, —C₁₋₆alkyl-C₃₋₈cycloalkyl, phenyl, —C₁₋₆alkyl-phenyl, C₂₋₉heterocycloalkyl, —C₁₋₆alkyl-C₂₋₉heterocycloalkyl, C₂₋₉heteroaryl, and —C₁₋₆alkyl-C₂₋₉heteroaryl, wherein C₁₋₆alkyl, phenyl, —C₁₋₆alkyl-phenyl, —C₁₋₆alkyl-C₂₋₉heterocycloalkyl, C₂₋₉heteroaryl, and —C₁₋₆alkyl-C₂₋₉heteroaryl are optionally substituted with one or two groups independently selected from C₁₋₆alkyl, —OR¹¹, —N(R¹¹)₂, C₁₋₆alkyl, C₃₋₈cycloalkyl, —C(O)R¹², and —C(O)OR¹²;
[0480] each R¹⁰ is independently selected from H, C₁₋₆alkyl, C₁₋₆haloalkyl, C₃₋₈cycloalkyl, —C₁₋₆alkyl-C₃₋₈cycloalkyl, phenyl, —C₁₋₆alkyl-phenyl, and C₂₋₉heteroaryl, wherein C₁₋₆alkyl, phenyl, —C₁₋₆alkyl-phenyl, and C₂₋₉heteroaryl are optionally substituted with one or two groups independently selected from halogen, C₁₋₆alkyl, and —N(R¹¹)₂; or two R¹⁰ and the nitrogen atom to which they are attached are combined to form a 5- or 6-membered heterocycloalkyl ring optionally substituted with one, two, or three groups independently selected from C₁₋₆alkyl, oxo, and —C(O)OH;
[0481] each R¹¹ is independently selected from H and C₁₋₆alkyl;
[0482] each R¹² is independently selected from H and C₁₋₆alkyl;
[0483] R¹³ is selected from H, C₁₋₆alkyl, C₁₋₆haloalkyl, C₃₋₈cycloalkyl, —C₁₋₆alkyl-C₃₋₈cycloalkyl, phenyl, —C₁₋₆alkyl-phenyl, and C₂₋₉heteroaryl;
[0484] each R¹⁴ is independently selected from H, C₁₋₆alkyl, C₁₋₆haloalkyl, C₃₋₈cycloalkyl, —C₁₋₆alkyl-C₃₋₈cycloalkyl, phenyl, —C₁₋₆alkyl-phenyl, C₂₋₉heterocycloalkyl, —C₁₋₆alkyl-C₂₋₉heterocycloalkyl, C₂₋₉heteroaryl, and —C₁₋₆alkyl-C₂₋₉heteroaryl;
[0485] p is 0, 1, 2, 3, or 4; and
[0486] q is 0, 1, 2, 3, or 4;

[0487] or a pharmaceutically acceptable salt or solvate thereof.

[0488] In some instances, the small molecule that binds GPR35 is a compound of Formula (VII):

[chemical structure]

[0489] R¹ is selected from H, C₁₋₆alkyl, C₁₋₆haloalkyl, C₃₋₈cycloalkyl, —C₁₋₆alkyl-C₃₋₈cycloalkyl, phenyl, —C₁₋₆alkyl-phenyl, and C₂₋₉heteroaryl;
[0490] R² is selected from H, halogen, —CN, —OH, —OR⁹, —SR⁹, —N(R¹⁰)₂, —S(O)R⁹, —S(O)₂R⁹, —NHS(O)₂R⁹, —S(O)₂N(R¹⁰)₂, —C(O)R⁹, —C(O)OR¹⁰, —OC(O)R⁹, —C(O)N(R¹⁰)₂, —OC(O)N(R¹⁰)₂, —NR¹⁰C(O)N(R¹⁰)₂, —NR¹⁰C(O)R⁹, —NR¹⁰C(O)OR⁹, C₁₋₆alkyl, —C₁₋₆alkyl-OH, —C₁₋₆alkyl-OR⁹, —C₁₋₆alkyl-N(R¹⁰)₂, C₂₋₆alkenyl, C₂₋₆alkynyl, C₁₋₆haloalkyl, C₃₋₈cycloalkyl, and —C₁₋₆alkyl-C₃₋₈cycloalkyl;
[0491] each R³ and each R⁴ is independently selected from halogen, —CN, —OH, —OR⁹, —SR⁹, —N(R¹⁰)₂, —S(O)R⁹, —S(O)₂R⁹, —NHS(O)₂R⁹, —S(O)₂N(R¹⁰)₂, —C(O)R⁹, —C(O)OR¹⁰, —OC(O)R⁹, —C(O)N(R¹⁰)₂, —OC(O)N(R¹⁰)₂, —NR¹⁰C(O)N(R¹⁰)₂, —NR¹⁰C(O)R⁹, —NR¹⁰C(O)OR⁹, C₁₋₆alkyl, —C₁₋₆alkyl-OH, —C₁₋₆alkyl-OR⁹, —C₁₋₆alkyl-N(R¹⁰)₂, C₂₋₆alkenyl, C₂₋₆alkynyl, C₁₋₆haloalkyl, C₃₋₈cycloalkyl, and —C₁₋₆alkyl-C₃₋₈cycloalkyl;
[0492] each R⁹ is independently selected from C₁₋₆alkyl, C₁₋₆haloalkyl, C₃₋₈cycloalkyl, —C₁₋₆alkyl-C₃₋₈cycloalkyl, phenyl, —C₁₋₆alkyl-phenyl, C₂₋₉heterocycloalkyl, —C₁₋₆alkyl-C₂₋₉heterocycloalkyl, C₂₋₉heteroaryl, and —C₁₋₆alkyl-C₂₋₉heteroaryl, wherein C₁₋₆alkyl, phenyl, —C₁₋₆alkyl-phenyl, —C₁₋₆alkyl-C₂₋₉heterocycloalkyl, C₂₋₉heteroaryl, and —C₁₋₆alkyl-C₂₋₉heteroaryl are optionally substituted with one or two groups independently selected from C₁₋₆alkyl, —OR¹, —N(R¹¹)₂, C₁₋₆alkyl, C₃₋₈cycloalkyl, —C(O)R¹², and —C(O)OR¹²;
[0493] each R¹⁰ is independently selected from H, C₁₋₆alkyl, C₁₋₆haloalkyl, C₃₋₈cycloalkyl, —C₁₋₆alkyl-C₃₋₈cycloalkyl, phenyl, —C₁₋₆alkyl-phenyl, and C₂₋₉heteroaryl, wherein C₁₋₆alkyl, phenyl, —C₁₋₆alkyl-phenyl, and C₂₋₉heteroaryl are optionally substituted with one or two groups independently selected from halogen, C₁₋₆alkyl, and —N(R¹¹)₂; or two R¹⁰ and the nitrogen atom to which they are attached are combined to form a 5- or 6-membered heterocycloalkyl ring optionally substituted with one, two, or three groups independently selected from C₁₋₆alkyl, oxo, and —C(O)OH;
[0494] each R¹¹ is independently selected from H and C₁₋₆alkyl;
[0495] each R¹² is independently selected from H and C₁₋₆alkyl;
[0496] p is 0, 1, 2, 3, or 4; and
[0497] q is 0, 1, 2, 3, or 4;

[0498] or a pharmaceutically acceptable salt or solvate thereof.

[0499] In some instances, the small molecule that binds GPR35 is a compound of Formula (VIII):

[chemical structure]

[0500] wherein:
[0501] X is selected from —O—, —S—, and —SO₂—; R¹ is selected from H, C₁₋₆alkyl, C₁₋₆haloalkyl, C₃₋₈cycloalkyl, —C₁₋₆alkyl-C₃₋₈cycloalkyl, phenyl, —C₁₋₆alkyl-phenyl, and C₂₋₉heteroaryl;
[0502] each R² and each R³ is independently selected from halogen, —CN, —OH, —OR⁹, —SR⁹, —N(R¹⁰)₂, —S(O)R⁹, —S(O)₂R⁹, —NHS(O)₂R⁹, —S(O)₂N(R¹⁰)₂, —C(O)R⁹, —C(O)OR¹⁰, —OC(O)R⁹, —C(O)N(R¹⁰)₂, —OC(O)N(R¹⁰)₂, —NR¹⁰C(O)N(R¹⁰)₂, —NR¹⁰C(O)R⁹, —NR¹⁰C(O)OR⁹, C₁₋₆alkyl, —C₁₋₆alkyl-OH, —C₁₋₆alkyl-OR⁹, —C₁₋₆alkyl-N(R¹⁰)₂, C₂₋₆alkenyl, C₂₋₆alkynyl, C₁₋₆haloalkyl, C₃₋₈cycloalkyl, and —C₁₋₆alkyl-C₃₋₈cycloalkyl;
[0503] R⁴ is selected from —C(O)OH, —C(O)OR¹⁰,

[chemical structure]

[0504] R⁵ is selected from H, halogen, —CN, —OH, —OR⁹, —SR⁹, —N(R¹⁰)₂, —S(O)R⁹, —S(O)₂R⁹, —NHS(O)₂R⁹, —S(O)₂N(R¹⁰)₂, —C(O)R⁹, —C(O)OR¹⁰, —OC(O)R⁹, —C(O)N(R¹⁰)₂, —OC(O)N(R¹⁰)₂, —NR¹⁰C(O)N(R¹⁰)₂, —NR¹⁰C(O)R⁹, —NR¹⁰C(O)OR⁹, C₁₋₆alkyl, —C₁₋₆alkyl-OH, —C₁₋₆alkyl-OR⁹, —C₁₋₆alkyl-N(R¹⁰)₂, C₂₋₆alkenyl, C₂₋₆alkynyl, C₁₋₆haloalkyl, C₃₋₈cycloalkyl, and —C₁₋₆alkyl-C₃₋₈cycloalkyl;
[0505] each R⁹ is independently selected from C₁₋₆alkyl, C₁₋₆haloalkyl, C₃₋₈cycloalkyl, —C₁₋₆alkyl-C₃₋₈cycloalkyl, phenyl, —C₁₋₆alkyl-phenyl, C₂₋₉heterocycloalkyl, —C₁₋₆alkyl-C₂₋₉heterocycloalkyl, C₂₋₉heteroaryl, and —C₁₋₆alkyl-C₂₋₉heteroaryl, wherein C₁₋₆alkyl, phenyl, —C₁₋₆alkyl-phenyl, —C₁₋₆alkyl-C₂₋₉heterocycloalkyl, C₂₋₉heteroaryl, and —C₁₋₆alkyl-C₂₋₉heteroaryl are optionally substituted with one or two groups independently selected from C₁₋₆alkyl, —OR¹¹, —N(R¹¹)₂, C₁₋₆alkyl, C₃₋₈cycloalkyl, —C(O)R¹², and —C(O)OR¹²;
[0506] each R¹⁰ is independently selected from H, C₁₋₆alkyl, C₁₋₆haloalkyl, C₃₋₈cycloalkyl, —C₁₋₆alkyl-C₃₋₈cycloalkyl, phenyl, —C₁₋₆alkyl-phenyl, and C₂₋₉heteroaryl, wherein C₁₋₆alkyl, phenyl, —C₁₋₆alkyl-phenyl, and C₂₋₉heteroaryl are optionally substituted with one or two groups independently selected from halogen, C₁₋₆alkyl, and —N(R¹¹)₂; or two R¹⁰ and the nitrogen atom to which they are attached are combined to form a 5- or 6-membered heterocycloalkyl ring optionally substituted with one, two, or three groups independently selected from C₁₋₆alkyl, oxo, and —C(O)OH;
[0507] each R¹¹ is independently selected from H and C₁₋₆alkyl;
[0508] each R¹² is independently selected from H and C₁₋₆alkyl;
[0509] p is 0, 1, 2, 3, or 4; and
[0510] q is 0, 1, 2, or 3;

[0511] or a pharmaceutically acceptable salt or solvate thereof.

[0512] In some instances, the small molecule that binds GPR35 is a compound of Formula (IX):

[chemical structure]

[0513] wherein:
[0514] X is selected from —O— and —S—;
[0515] R¹ is selected from H, halogen, —CN, —OH, —OR⁹, —SR⁹, —N(R¹⁰)₂, —S(O)R⁹, —S(O)₂R⁹, —NHS(O)₂R⁹, —S(O)₂N(R¹⁰)₂, —C(O)R⁹, —C(O)OR¹⁰, —OC(O)R⁹, —C(O)N(R¹⁰)₂, —OC(O)N(R¹⁰)₂, —NR¹⁰C(O)N(R¹⁰)₂, —NR¹⁰C(O)R⁹, —NR¹⁰C(O)OR⁹, C₁₋₆alkyl, —C₁₋₆alkyl-OH, —C₁₋₆alkyl-OR⁹, —C₁₋₆alkyl-N(R¹⁰)₂, C₂₋₆alkenyl, C₂₋₆alkynyl, C₁₋₆haloalkyl, C₃₋₈cycloalkyl, and —C₁₋₆alkyl-C₃₋₈cycloalkyl;
[0516] R² is selected from —C(O)OH, —C(O)OR¹⁰,

[chemical structure]

[0517] each R³ is independently selected from halogen, —CN, —OH, NO₂, —OR⁹, —SR⁹, —N(R¹⁰)₂, —S(O)R⁹, —S(O)₂R⁹, —NHS(O)₂R⁹, —S(O)₂N(R¹⁰)₂, —C(O)R⁹, —C(O)OR¹⁰, —OC(O)R⁹, —C(O)N(R¹⁰)₂—OC(O)N(R¹⁰)₂, —NR¹⁰C(O)N(R¹⁰)₂, —NR¹⁰C(O)R⁹, —NR¹⁰C(O)OR⁹, C₁₋₆alkyl, —C₁₋₆alkyl-OH, —C₁₋₆alkyl-OR⁹, —C₁₋₆alkyl-N(R¹⁰)₂, C₂₋₆alkenyl, C₂₋₆alkynyl, C₁₋₆haloalkyl, C₃₋₈cycloalkyl, and —C₁₋₆alkyl-C₃₋₈cycloalkyl;
[0518] each R⁹ is independently selected from C₁₋₆alkyl, C₁₋₆haloalkyl, C₃₋₈cycloalkyl, —C₁₋₆alkyl-C₃₋₈cycloalkyl, phenyl, —C₁₋₆alkyl-phenyl, C₂₋₉heterocycloalkyl, —C₁₋₆alkyl-C₂₋₉heterocycloalkyl, C₂₋₉heteroaryl, and —C₁₋₆alkyl-C₂₋₉heteroaryl, wherein C₁₋₆alkyl, phenyl, —C₁₋₆alkyl-phenyl, —C₁₋₆ alkyl-C₂₋₉heterocycloalkyl, C₂₋₉heteroaryl, and —C₁₋₆alkyl-C₂₋₉heteroaryl are optionally substituted with one or two groups independently selected from C₁₋₆alkyl, —OR¹¹, —N(R¹¹)₂, C₁₋₆ alkyl, C₃₋₈cycloalkyl, —C(O)R¹², and —C(O)OR¹²;
[0519] each R¹⁰ is independently selected from H, C₁₋₆alkyl, C₁₋₆haloalkyl, C₃₋₈cycloalkyl, —C₁₋₆alkyl-C₃₋₈cycloalkyl, phenyl, —C₁₋₆alkyl-phenyl, and C₂₋₉heteroaryl, wherein C₁₋₆alkyl, phenyl, —C₁₋₆ alkyl-phenyl, and C₂₋₉heteroaryl are optionally substituted with one or two groups independently selected from halogen, C₁₋₆alkyl, and —N(R¹¹)₂; or two R¹⁰ and the nitrogen atom to which they are attached are combined to form a 5- or 6-membered heterocycloalkyl ring optionally substituted with one, two, or three groups independently selected from C₁₋₆ alkyl, oxo, and —C(O)OH;
[0520] each R¹¹ is independently selected from H and C₁₋₆alkyl;
[0521] each R¹² is independently selected from H and C₁₋₆alkyl; and
[0522] p is 0, 1, 2, 3, or 4;

[0523] or a pharmaceutically acceptable salt or solvate thereof.

[0524] In some instances, the small molecule that binds GPR35 is a compound of Formula (X):

[chemical structure]

[0525] wherein:
[0526] R¹ is selected from —C(O)OH, —C(O)OR¹⁰,

[chemical structure]

[0527] each R² is independently selected from halogen, —CN, —OH, —OR⁹, —SR⁹, —N(R¹⁰)₂, —S(O)R⁹, —S(O)₂R⁹, —NHS(O)₂R⁹, —S(O)₂N(R¹⁰)₂, —C(O)R⁹, —C(O)OR¹⁰, —OC(O)R⁹, —C(O)N(R¹⁰)₂, —OC(O)N(R¹⁰)₂, —NR¹⁰C(O)N(R¹⁰)₂, —NR¹⁰C(O)R⁹, —NR¹⁰C(O)OR⁹, C₁₋₆alkyl, —C₁₋₆alkyl-OH, —C₁₋₆alkyl-OR⁹, —C₁₋₆alkyl-N(R¹⁰)₂, C₂₋₆alkenyl, C₂₋₆alkynyl, C₁₋₆haloalkyl, C₃₋₈cycloalkyl, and —C₁₋₆alkyl-C₃₋₈cycloalkyl;
[0528] each R³ is independently selected from H, halogen, —CN, —OH, NO₂, —OR⁹, —SR⁹, —N(R¹⁰)₂, —S(O)R⁹, —S(O)₂R⁹, —NHS(O)₂R⁹, —S(O)₂N(R¹⁰)₂, —C(O)R⁹, —C(O)OR¹⁰, —OC(O)R⁹, —C(O)N(R¹⁰)₂, —OC(O)N(R¹⁰)₂, —NR¹⁰C(O)N(R¹⁰)₂, —NR¹⁰C(O)R⁹, —NR¹⁰C(O)OR⁹, C₁₋₆alkyl, —C₁₋₆alkyl-OH, —C₁₋₆alkyl-OR⁹, —C₁₋₆alkyl-N(R¹⁰)₂, C₂₋₆alkenyl, C₂₋₆alkynyl, C₁₋₆haloalkyl, C₃₋₈cycloalkyl, and —C₁₋₆alkyl-C₃₋₈cycloalkyl;
[0529] each R⁹ is independently selected from C₁₋₆alkyl, C₁₋₆haloalkyl, C₃₋₈cycloalkyl, —C₁₋₆alkyl-C₃₋₈cycloalkyl, phenyl, —C₁₋₆alkyl-phenyl, C₂₋₉heterocycloalkyl, —C₁₋₆alkyl-C₂₋₉heterocycloalkyl, C₂₋₉heteroaryl, and —C₁₋₆alkyl-C₂₋₉heteroaryl, wherein C₁₋₆alkyl, phenyl, —C₁₋₆alkyl-phenyl, —C₁₋₆alkyl-C₂₋₉heterocycloalkyl, C₂₋₉heteroaryl, and —C₁₋₆alkyl-C₂₋₉heteroaryl are optionally substituted with one or two groups independently selected from C₁₋₆alkyl, —OR¹, —N(R¹¹)₂, C₁₋₆alkyl, C₃₋₈cycloalkyl, —C(O)R¹², and —C(O)OR¹²;
[0530] each R¹⁰ is independently selected from H, C₁₋₆alkyl, C₁₋₆haloalkyl, C₃₋₈cycloalkyl, —C₁₋₆alkyl-C₃₋₈cycloalkyl, phenyl, —C₁₋₆alkyl-phenyl, and C₂₋₉heteroaryl, wherein C₁₋₆alkyl, phenyl, —C₁₋₆alkyl-phenyl, and C₂₋₉heteroaryl are optionally substituted with one or two groups independently selected from halogen, C₁₋₆alkyl, and —N(R¹¹)₂; or two R¹⁰ and the nitrogen atom to which they are attached are combined to form a 5- or 6-membered heterocycloalkyl ring optionally substituted with one, two, or three groups independently selected from C₁₋₆alkyl, oxo, and —C(O)OH;
[0531] each R¹¹ is independently selected from H and C₁₋₆alkyl;
[0532] each R¹² is independently selected from H and C₁₋₆alkyl; and
[0533] p is 0, 1, 2, 3, or 4;

[0534] or a pharmaceutically acceptable salt or solvate thereof.

[0535] In some instances, the small molecule that binds GPR35 is a compound of Formula (XI):

[chemical structure]

[0536] wherein:
[0537] X is selected from —O—, —S—, and —SO₂—;
[0538] R¹ is selected from H, halogen, —CN, —OH, —OR⁹, —SR⁹, —N(R¹⁰)₂, —S(O)R⁹, —S(O)₂R⁹, —NHS(O)₂R⁹, —S(O)₂N(R¹⁰)₂, —C(O)R⁹, —C(O)OR¹⁰, —OC(O)R⁹, —C(O)N(R¹⁰)₂, —OC(O)N(R¹⁰)₂, —NR¹⁰C(O)N(R¹⁰)₂, —NR¹⁰C(O)R⁹, —NR¹⁰C(O)OR⁹, C₁₋₆alkyl, —C₁₋₆alkyl-OH, —C₁₋₆alkyl-OR⁹, —C₁₋₆alkyl-N(R¹⁰)₂, C₂₋₆alkenyl, C₂₋₆alkynyl, C₁₋₆haloalkyl, C₃₋₈cycloalkyl, and —C₁₋₆alkyl-C₃₋₈cycloalkyl;
[0539] each R² and each R³ is independently selected from halogen, —CN, —OH, —OR⁹, —SR⁹, —N(R¹⁰)₂, —S(O)R⁹, —S(O)₂R⁹, —NHS(O)₂R⁹, —S(O)₂N(R¹⁰)₂, —C(O)R⁹, —C(O)OR¹⁰, —OC(O)R⁹, —C(O)N(R¹⁰)₂, —OC(O)N(R¹⁰)₂, —NR¹⁰C(O)N(R¹⁰)₂, —NR¹⁰C(O)R⁹, —NR¹⁰C(O)OR⁹, C₁₋₆alkyl, —C₁₋₆alkyl-OH, —C₁₋₆alkyl-OR⁹, —C₁₋₆alkyl-N(R¹⁰)₂, C₂₋₆alkenyl, C₂₋₆alkynyl, C₁₋₆haloalkyl, C₃₋₈cycloalkyl, and —C₁₋₆alkyl-C₃₋₈cycloalkyl;
[0540] each R⁹ is independently selected from C₁₋₆alkyl, C₁₋₆haloalkyl, C₃₋₈cycloalkyl, —C₁₋₆alkyl-C₃₋₈cycloalkyl, phenyl, —C₁₋₆alkyl-phenyl, C₂₋₉heterocycloalkyl, —C₁₋₆alkyl-C₂₋₉heterocycloalkyl, C₂₋₉heteroaryl, and —C₁₋₆alkyl-C₂₋₉heteroaryl, wherein C₁₋₆alkyl, phenyl, —C₁₋₆alkyl-phenyl, —C₁₋₆alkyl-C₂₋₉heterocycloalkyl, C₂₋₉heteroaryl, and —C₁₋₆alkyl-C₂₋₉heteroaryl are optionally substituted with one or two groups independently selected from C₁₋₆alkyl, —OR¹¹, —N(R¹¹)₂, C₁₋₆alkyl, C₃₋₈cycloalkyl, —C(O)R¹², and —C(O)OR¹²;
[0541] each R¹⁰ is independently selected from H, C₁₋₆alkyl, C₁₋₆haloalkyl, C₃₋₈cycloalkyl, —C₁₋₆alkyl-C₃₋₈cycloalkyl, phenyl, —C₁₋₆alkyl-phenyl, and C₂₋₉heteroaryl, wherein C₁₋₆alkyl, phenyl, —C₁₋₆alkyl-phenyl, and C₂₋₉heteroaryl are optionally substituted with one or two groups independently selected from halogen, C₁₋₆alkyl, and —N(R¹¹)₂; or two R¹⁰ and the nitrogen atom to which they are attached are combined to form a 5- or 6-membered heterocycloalkyl ring optionally substituted with one, two, or three groups independently selected from C₁₋₆alkyl, oxo, and —C(O)OH;
[0542] each R¹¹ is independently selected from H and C₁₋₆alkyl;
[0543] each R¹² is independently selected from H and C₁₋₆alkyl;
[0544] p is 0, 1, 2, 3, or 4; and
[0545] q is 0, 1, 2, 3, or 4;

[0546] or a pharmaceutically acceptable salt or solvate thereof.

[0547] In some instances, the small molecule that binds GPR35 is a compound of Formula (XII):

[chemical structure]

[0548] wherein:
[0549] X is selected from —O—, —S—, —NR¹³—, and —C(R¹⁴)₂—;
[0550] each R¹ is independently selected from H, halogen, —CN, —OH, —OR⁹, —SR⁹, —N(R¹⁰)₂, —S(O)R⁹, —S(O)₂R⁹, —NHS(O)₂R⁹, —S(O)₂N(R¹⁰)₂, —C(O)R⁹, —C(O)OR¹⁰, —OC(O)R⁹, —C(O)N(R¹⁰)₂, C₁₋₆ alkyl, —C₁-6alkyl-OH, —C₁₋₆alkyl-OR⁹, —C₁₋₆alkyl-N(R¹⁰)₂, C₂₋₆alkenyl, C₂₋₆alkynyl, C₁₋₆ haloalkyl, C₃₋₈cycloalkyl, and —C₁₋₆alkyl-C₃₋₈cycloalkyl;
[0551] R² is selected from H and C₁₋₆alkyl;
[0552] each R³ and each R⁴ is independently selected from halogen, —CN, —OH, —OR⁹, —SR⁹, —N(R¹⁰)₂, —S(O)R⁹, —S(O)₂R⁹, —NHS(O)₂R⁹, —S(O)₂N(R¹⁰)₂, —C(O)R⁹, —C(O)OR¹⁰, —OC(O)R⁹, —C(O)N(R¹⁰)₂, —OC(O)N(R¹⁰)₂, —NR¹⁰C(O)N(R¹⁰)₂, —NR¹⁰C(O)R⁹, —NR¹⁰C(O)OR⁹, C₁₋₆alkyl, —C₁₋₆alkyl-OH, —C₁₋₆alkyl-OR⁹, —C₁₋₆alkyl-N(R¹⁰)₂, C₂₋₆alkenyl, C₂₋₆alkynyl, C₁₋₆haloalkyl, C₃₋₈cycloalkyl, and —C₁₋₆alkyl-C₃₋₈cycloalkyl;
[0553] each R⁹ is independently selected from C₁₋₆alkyl, C₁₋₆haloalkyl, C₃₋₈cycloalkyl, —C₁₋₆alkyl-C₃₋₈cycloalkyl, phenyl, —C₁₋₆alkyl-phenyl, C₂₋₉heterocycloalkyl, —C₁₋₆alkyl-C₂₋₉heterocycloalkyl, C₂₋₉heteroaryl, and —C₁₋₆alkyl-C₂₋₉heteroaryl, wherein C₁₋₆alkyl, phenyl, —C₁₋₆alkyl-phenyl, —C₁₋₆alkyl-C₂₋₉heterocycloalkyl, C₂₋₉heteroaryl, and —C₁₋₆alkyl-C₂₋₉heteroaryl are optionally substituted with one or two groups independently selected from C₁₋₆alkyl, —OR¹, —N(R¹¹)₂, C₁₋₆alkyl, C₃₋₈cycloalkyl, —C(O)R¹², and —C(O)OR¹²;
[0554] each R¹⁰ is independently selected from H, C₁₋₆alkyl, C₁₋₆haloalkyl, C₃₋₈cycloalkyl, —C₁₋₆alkyl-C₃₋₈cycloalkyl, phenyl, —C₁₋₆alkyl-phenyl, and C₂₋₉heteroaryl, wherein C₁₋₆alkyl, phenyl, —C₁₋₆alkyl-phenyl, and C₂₋₉heteroaryl are optionally substituted with one or two groups independently selected from halogen, C₁₋₆alkyl, and —N(R¹)₂; or two R¹⁰ and the nitrogen atom to which they are attached are combined to form a 5- or 6-membered heterocycloalkyl ring optionally substituted with one, two, or three groups independently selected from C₁₋₆alkyl, oxo, and —C(O)OH;
[0555] each R¹¹ is independently selected from H and C₁₋₆alkyl;
[0556] each R¹² is independently selected from H and C₁₋₆alkyl;
[0557] R¹³ is selected from H, C₁₋₆alkyl, C₁₋₆haloalkyl, C₃₋₈cycloalkyl, —C₁₋₆alkyl-C₃₋₈cycloalkyl, phenyl, —C₁₋₆alkyl-phenyl, and C₂₋₉heteroaryl;
[0558] R¹⁴ is selected from H, C₁₋₆alkyl, C₁₋₆haloalkyl, C₃₋₈cycloalkyl, —C₁₋₆alkyl-C₃₋₈cycloalkyl, phenyl, —C₁₋₆alkyl-phenyl, C₂₋₉heterocycloalkyl, —C₁₋₆alkyl-C₂₋₉heterocycloalkyl, C₂₋₉heteroaryl, and —C₁₋₆alkyl-C₂₋₉heteroaryl;
[0559] p is 0, 1, 2, 3, or 4; and
[0560] q is 0, 1, 2, 3, or 4;

[0561] or a pharmaceutically acceptable salt or solvate thereof.

[0562] In some instances, the small molecule that binds GPR35 is a compound of Formula (XIII):

[chemical structure]

[0563] wherein:
[0564] X¹ and X² are independently —O—, —S—, or —NR¹³—;
[0565] R¹ is selected from —C(O)OH, —C(O)OR¹⁰,

[chemical structure]

[0566] R² is selected from H, halogen, —CN, —OH, —OR⁹, —SR⁹, —N(R¹⁰)₂, —S(O)R⁹, —S(O)₂R⁹, —NHS(O)₂R⁹, —S(O)₂N(R¹⁰)₂, —C(O)R⁹, —C(O)OR¹⁰, —OC(O)R⁹, —C(O)N(R¹⁰)₂, —OC(O)N(R¹⁰)₂, —NR¹⁰C(O)N(R¹⁰)₂, —NR¹⁰C(O)R⁹, —NR¹⁰C(O)OR⁹, C₁₋₆alkyl, —C₁₋₆alkyl-OH, —C₁₋₆alkyl-OR⁹, —C₁₋₆alkyl-N(R¹⁰)₂, C₂₋₆alkenyl, C₂₋₆alkynyl, C₁₋₆haloalkyl, C₃₋₈cycloalkyl, and —C₁₋₆alkyl-C₃₋₈cycloalkyl;
[0567] each R³ is independently selected from halogen, —CN, —OH, —OR⁹, —SR⁹, —N(R¹⁰)₂, —S(O)R⁹, —S(O)₂R⁹, —NHS(O)₂R⁹, —S(O)₂N(R¹⁰)₂, —C(O)R⁹, —C(O)OR¹⁰, —OC(O)R⁹, —C(O)N(R¹⁰)₂, —OC(O)N(R¹⁰)₂, —NR¹⁰C(O)N(R¹⁰)₂, —NR¹⁰C(O)R⁹, —NR¹⁰C(O)OR⁹, C₁₋₆alkyl, —C₁₋₆alkyl-OH, —C₁₋₆alkyl-OR⁹, —C₁₋₆alkyl-N(R¹⁰)₂, C₂₋₆alkenyl, C₂₋₆alkynyl, C₁₋₆haloalkyl, C₃₋₈cycloalkyl, and —C₁₋₆alkyl-C₃₋₈cycloalkyl;
[0568] each R⁹ is independently selected from C₁₋₆alkyl, C₁₋₆haloalkyl, C₃₋₈cycloalkyl, —C₁₋₆alkyl-C₃₋₈cycloalkyl, phenyl, —C₁₋₆alkyl-phenyl, C₂₋₉heterocycloalkyl, —C₁₋₆alkyl-C₂₋₉heterocycloalkyl, C₂₋₉heteroaryl, and —C₁₋₆alkyl-C₂₋₉heteroaryl, wherein C₁₋₆alkyl, phenyl, —C₁₋₆alkyl-phenyl, —C₁₋₆alkyl-C₂₋₉heterocycloalkyl, C₂₋₉heteroaryl, and —C₁₋₆alkyl-C₂₋₉heteroaryl are optionally substituted with one or two groups independently selected from C₁₋₆alkyl, —OR¹, —N(R¹¹)₂, C₁₋₆alkyl, C₃₋₈cycloalkyl, —C(O)R¹², and —C(O)OR¹²;
[0569] each R¹⁰ is independently selected from H, C₁₋₆alkyl, C₁₋₆haloalkyl, C₃₋₈cycloalkyl, —C₁₋₆alkyl-C₃₋₈cycloalkyl, phenyl, —C₁₋₆alkyl-phenyl, and C₂₋₉heteroaryl, wherein C₁₋₆alkyl, phenyl, —C₁₋₆alkyl-phenyl, and C₂₋₉heteroaryl are optionally substituted with one or two groups independently selected from halogen, C₁₋₆alkyl, and —N(R¹¹)₂; or two R¹⁰ and the nitrogen atom to which they are attached are combined to form a 5- or 6-membered heterocycloalkyl ring optionally substituted with one, two, or three groups independently selected from C₁₋₆alkyl, oxo, and —C(O)OH;
[0570] each R¹¹ is independently selected from H and C₁₋₆alkyl;
[0571] each R¹² is independently selected from H and C₁₋₆alkyl;
[0572] R¹³ is selected from H, C₁₋₆alkyl, C₁₋₆haloalkyl, C₃₋₈cycloalkyl, —C₁₋₆alkyl-C₃₋₈cycloalkyl, phenyl, —C₁₋₆alkyl-phenyl, and C₂₋₉heteroaryl; and
[0573] p is 0, 1 or 2;

[0574] or a pharmaceutically acceptable salt or solvate thereof.

[0575] In some instances, the small molecule that binds GPR35 is a compound of Formula (XIV):

[chemical structure]

[0576] wherein:
[0577] R¹ and R² are independently selected from H, halogen, —CN, —OH, —OR⁹, —SR⁹, —N(R¹⁰)₂, —S(O)R⁹, —S(O)₂R⁹, —NHS(O)₂R⁹, —S(O)₂N(R¹⁰)₂, —C(O)R⁹, —C(O)OR¹⁰, —OC(O)R⁹, —C(O)N(R¹⁰)₂, —OC(O)N(R¹⁰)₂, —NR¹⁰C(O)N(R¹⁰)₂, —NR¹⁰C(O)R⁹, —NR¹⁰C(O)OR⁹, C₁₋₆alkyl, —C₁₋₆alkyl-OH, —C₁₋₆alkyl-OR⁹, —C₁₋₆alkyl-N(R¹⁰)₂, C₂₋₆alkenyl, C₂₋₆alkynyl, C₁₋₆haloalkyl, C₃₋₈cycloalkyl, and —C₁₋₆alkyl-C₃₋₈cycloalkyl;
[0578] each R³ is independently selected from halogen, —CN, —OH, —OR⁹, —SR⁹, —N(R¹⁰)₂, —S(O)R⁹, —S(O)₂R⁹, —NHS(O)₂R⁹, —S(O)₂N(R¹⁰)₂, —C(O)R⁹, —C(O)OR¹⁰, —OC(O)R⁹, —C(O)N(R¹⁰)₂, —OC(O)N(R¹⁰)₂, —NR¹⁰C(O)N(R¹⁰)₂, —NR¹⁰C(O)R⁹, —NR¹⁰C(O)OR⁹, C₁₋₆alkyl, —C₁₋₆alkyl-OH, —C₁₋₆alkyl-OR⁹, —C₁₋₆alkyl-N(R¹⁰)₂, C₂₋₆alkenyl, C₂₋₆alkynyl, C₁₋₆haloalkyl, C₃₋₈cycloalkyl, and —C₁₋₆alkyl-C₃₋₈cycloalkyl;
[0579] each R⁹ is independently selected from C₁₋₆alkyl, C₁₋₆haloalkyl, C₃₋₈cycloalkyl, —C₁₋₆alkyl-C₃₋₈cycloalkyl, phenyl, —C₁₋₆alkyl-phenyl, C₂₋₉heterocycloalkyl, —C₁₋₆alkyl-C₂₋₉heterocycloalkyl, C₂₋₉heteroaryl, and —C₁₋₆alkyl-C₂₋₉heteroaryl, wherein C₁₋₆alkyl, phenyl, —C₁₋₆alkyl-phenyl, —C₁₋₆alkyl-C₂₋₉heterocycloalkyl, C₂₋₉heteroaryl, and —C₁₋₆alkyl-C₂₋₉heteroaryl are optionally substituted with one or two groups independently selected from C₁₋₆alkyl, —OR¹, —N(R¹¹)₂, C₁₋₆alkyl, C₃₋₈cycloalkyl, —C(O)R¹², and —C(O)OR¹²;
[0580] each R¹⁰ is independently selected from H, C₁₋₆alkyl, C₁₋₆haloalkyl, C₃₋₈cycloalkyl, —C₁₋₆alkyl-C₃₋₈cycloalkyl, phenyl, —C₁₋₆alkyl-phenyl, and C₂₋₉heteroaryl, wherein C₁₋₆alkyl, phenyl, —C₁₋₆alkyl-phenyl, and C₂₋₉heteroaryl are optionally substituted with one or two groups independently selected from halogen, C₁₋₆alkyl, and —N(R¹¹)₂; or two R¹⁰ and the nitrogen atom to which they are attached are combined to form a 5- or 6-membered heterocycloalkyl ring optionally substituted with one, two, or three groups independently selected from C₁₋₆alkyl, oxo, and —C(O)OH;
[0581] each R¹¹ is independently selected from H and C₁₋₆alkyl;
[0582] each R¹² is independently selected from H and C₁₋₆alkyl; and
[0583] p is 0, 1, 2, 3, or 4;

[0584] or a pharmaceutically acceptable salt or solvate thereof.

[0585] In some instances, the small molecule that binds GPR35 is a compound of Formula (XV):

[chemical structure]

[0586] wherein:
[0587] X is selected from —O—, —S—, and —SO₂—;
[0588] Y is N or CR²;
[0589] R¹ is —C(O)OH, —C(O)OR¹⁰,

[chemical structure]

[0590] each R² is independently selected from H, halogen, —CN, —OH, —OR⁹, —SR⁹, —N(R¹⁰)₂, —S(O)R⁹, —S(O)₂R⁹, —NHS(O)₂R⁹, —S(O)₂N(R¹⁰)₂, —C(O)R⁹, —C(O)OR¹⁰, —OC(O)R⁹, —C(O)N(R¹⁰)₂, —OC(O)N(R¹⁰)₂, —NR¹⁰C(O)N(R¹⁰)₂, —NR¹⁰C(O)R⁹, —NR¹⁰C(O)OR⁹, C₁₋₆alkyl, —C₁₋₆alkyl-OH, —C₁₋₆alkyl-OR⁹, —C₁₋₆alkyl-N(R¹⁰)₂, C₂₋₆alkenyl, C₂₋₆alkynyl, C₁₋₆haloalkyl, C₃₋₈cycloalkyl, and —C₁₋₆alkyl-C₃₋₈cycloalkyl;
[0591] each R³ is independently selected from halogen, —CN, —OH, —OR⁹, —SR⁹, —N(R¹⁰)₂, —S(O)R⁹, —S(O)₂R⁹, —NHS(O)₂R⁹, —S(O)₂N(R¹⁰)₂, —C(O)R⁹, —C(O)OR¹⁰, —OC(O)R⁹, —C(O)N(R¹⁰)₂, —OC(O)N(R¹⁰)₂, —NR¹⁰C(O)N(R¹⁰)₂, —NR¹⁰C(O)R⁹, —NR¹⁰C(O)OR⁹, C₁₋₆alkyl, —C₁₋₆alkyl-OH, —C₁₋₆alkyl-OR⁹, —C₁₋₆alkyl-N(R¹⁰)₂, C₂₋₆alkenyl, C₂₋₆alkynyl, C₁₋₆haloalkyl, C₃₋₈cycloalkyl, and —C₁₋₆alkyl-C₃₋₈cycloalkyl;
[0592] each R⁹ is independently selected from C₁₋₆alkyl, C₁₋₆haloalkyl, C₃₋₈cycloalkyl, —C₁₋₆alkyl-C₃₋₈cycloalkyl, phenyl, —C₁₋₆alkyl-phenyl, C₂₋₉heterocycloalkyl, —C₁₋₆alkyl-C₂₋₉heterocycloalkyl, C₂₋₉heteroaryl, and —C₁₋₆alkyl-C₂₋₉heteroaryl, wherein C₁₋₆alkyl, phenyl, —C₁₋₆alkyl-phenyl, —C₁₋₆alkyl-C₂₋₉heterocycloalkyl, C₂₋₉heteroaryl, and —C₁₋₆alkyl-C₂₋₉heteroaryl are optionally substituted with one or two groups independently selected from C₁₋₆alkyl, —OR¹, —N(R¹¹)₂, C₁₋₆ alkyl, C₃₋₈cycloalkyl, —C(O)R¹², and —C(O)OR¹²;
[0593] each R¹⁰ is independently selected from H, C₁₋₆alkyl, C₁₋₆haloalkyl, C₃₋₈cycloalkyl, —C₁₋₆alkyl-C₃₋₈cycloalkyl, phenyl, —C₁₋₆alkyl-phenyl, and C₂₋₉heteroaryl, wherein C₁₋₆alkyl, phenyl, —C₁₋₆alkyl-phenyl, and C₂₋₉heteroaryl are optionally substituted with one or two groups independently selected from halogen, C₁₋₆alkyl, and —N(R¹¹)₂; or two R¹⁰ and the nitrogen atom to which they are attached are combined to form a 5- or 6-membered heterocycloalkyl ring optionally substituted with one, two, or three groups independently selected from C₁₋₆alkyl, oxo, and —C(O)OH;
[0594] each R¹¹ is independently selected from H and C₁₋₆alkyl;
[0595] each R¹² is independently selected from H and C₁₋₆alkyl; and
[0596] p is 0, 1, 2, 3, or 4;

[0597] or a pharmaceutically acceptable salt or solvate thereof.

[0598] In some instances, the small molecule that binds GPR35 is a compound of Formula (XVI):

[chemical structure]

[0599] wherein:
[0600] X is selected from —O—, —S—, and —NR¹³—;
[0601] R¹ is selected from —C(O)OH, —C(O)OR¹⁰,

[chemical structure]

[0602] each R² and each R⁷ is independently selected from halogen, —CN, —OH, —OR⁹, —SR⁹, —N(R¹⁰)₂, —S(O)R⁹, —S(O)₂R⁹, —NHS(O)₂R⁹, —S(O)₂N(R¹⁰)₂, —C(O)R⁹, —C(O)OR¹⁰, —OC(O)R⁹, —C(O)N(R¹⁰)₂, —OC(O)N(R¹⁰)₂, —NR¹⁰C(O)N(R¹⁰)₂, —NR¹⁰C(O)R⁹, —NR¹⁰C(O)OR⁹, C₁₋₆alkyl, —C₁₋₆alkyl-OH, —C₁₋₆alkyl-OR⁹, —C₁₋₆alkyl-N(R¹⁰)₂, C₂₋₆alkenyl, C₂₋₆alkynyl, C₁₋₆haloalkyl, C₃₋₈cycloalkyl, and —C₁₋₆alkyl-C₃₋₈cycloalkyl;
[0603] R³ and R⁴ are independently selected from H and C₁₋₆alkyl;
[0604] R⁵ is selected from H, C₁₋₆alkyl, C₁₋₆haloalkyl, C₃₋₈cycloalkyl, —C₁₋₆alkyl-C₃₋₈cycloalkyl, phenyl, —C₁₋₆alkyl-phenyl, and C₂₋₉heteroaryl;
[0605] R⁶ is independently H, halogen, —CN, —OH, —OR⁹, —SR⁹, —N(R¹⁰)₂, —S(O)R⁹, —S(O)₂R⁹, —NHS(O)₂R⁹, —S(O)₂N(R¹⁰)₂, —C(O)R⁹, —C(O)OR¹⁰, —OC(O)R⁹, —C(O)N(R¹⁰)₂, —OC(O)N(R¹⁰)₂, —NR¹⁰C(O)N(R¹⁰)₂, —NR¹⁰C(O)R⁹, —NR¹⁰C(O)OR⁹, C₁₋₆alkyl, —C₁₋₆alkyl-OH, —C₁₋₆alkyl-OR⁹, —C₁₋₆alkyl-N(R¹⁰)₂, C₂₋₆alkenyl, C₂₋₆alkynyl, C₁₋₆haloalkyl, C₃₋₈cycloalkyl, and —C₁₋₆alkyl-C₃₋₈cycloalkyl;
[0606] each R⁹ is independently selected from C₁₋₆alkyl, C₁₋₆haloalkyl, C₃₋₈cycloalkyl, —C₁₋₆alkyl-C₃₋₈cycloalkyl, phenyl, —C₁₋₆alkyl-phenyl, C₂₋₉heterocycloalkyl, —C₁₋₆alkyl-C₂₋₉heterocycloalkyl, C₂₋₉heteroaryl, and —C₁₋₆alkyl-C₂₋₉heteroaryl, wherein C₁₋₆alkyl, phenyl, —C₁₋₆alkyl-phenyl, —C₁₋₆alkyl-C₂₋₉heterocycloalkyl, C₂₋₉heteroaryl, and —C₁₋₆alkyl-C₂₋₉heteroaryl are optionally substituted with one or two groups independently selected from C₁₋₆alkyl, —OR¹¹, —N(R¹¹)₂, C₁₋₆alkyl, C₃₋₈cycloalkyl, —C(O)R¹², and —C(O)OR¹²;
[0607] each R¹⁰ is independently selected from H, C₁₋₆alkyl, C₁₋₆haloalkyl, C₃₋₈cycloalkyl, —C₁₋₆alkyl-C₃₋₈cycloalkyl, phenyl, —C₁₋₆alkyl-phenyl, and C₂₋₉heteroaryl, wherein C₁₋₆alkyl, phenyl, —C₁₋₆alkyl-phenyl, and C₂₋₉heteroaryl are optionally substituted with one or two groups independently selected from halogen, C₁₋₆alkyl, and —N(R¹¹)₂; or two R¹⁰ and the nitrogen atom to which they are attached are combined to form a 5- or 6-membered heterocycloalkyl ring optionally substituted with one, two, or three groups independently selected from C₁₋₆alkyl, oxo, and —C(O)OH;
[0608] each R¹¹ is independently selected from H and C₁₋₆alkyl;
[0609] each R¹² is independently selected from H and C₁₋₆alkyl;
[0610] R¹³ is selected from H, C₁₋₆alkyl, C₁₋₆haloalkyl, C₃₋₈cycloalkyl, —C₁₋₆alkyl-C₃₋₈cycloalkyl, phenyl, —C₁₋₆alkyl-phenyl, and C₂₋₉heteroaryl;
[0611] p is 0, 1, 2, or 3; and
[0612] q is 0, 1, 2, or 3;

[0613] or a pharmaceutically acceptable salt or solvate thereof.

[0614] In some instances, the small molecule that binds GPR35 is a compound of Formula (XVII):

[chemical structure]

[0615] wherein:
[0616] X is selected from —O—, —S—, and —SO₂—;
[0617] R¹ is selected from —C(O)OH, —C(O)OR¹⁰,

[chemical structure]

[0618] each R² and each R³ is independently selected from halogen, —CN, —OH, —OR⁹, —SR⁹, —N(R¹⁰)₂, —S(O)R⁹, —S(O)₂R⁹, —NHS(O)₂R⁹, —S(O)₂N(R¹⁰)₂, —C(O)R⁹, —C(O)OR¹⁰, —OC(O)R⁹, —C(O)N(R¹⁰)₂, —OC(O)N(R¹⁰)₂, —NR¹⁰C(O)N(R¹⁰)₂, —NR¹⁰C(O)R⁹, —NR¹⁰C(O)OR⁹, C₁₋₆alkyl, —C₁₋₆alkyl-OH, —C₁₋₆alkyl-OR⁹, —C₁₋₆alkyl-N(R¹⁰)₂, C₂₋₆alkenyl, C₂₋₆alkynyl, C₁₋₆haloalkyl, C₃₋₈cycloalkyl, and —C₁₋₆alkyl-C₃₋₈cycloalkyl;
[0619] each R⁹ is independently selected from C₁₋₆alkyl, C₁₋₆haloalkyl, C₃₋₈cycloalkyl, —C₁₋₆alkyl-C₃₋₈cycloalkyl, phenyl, —C₁₋₆alkyl-phenyl, C₂₋₉heterocycloalkyl, —C₁₋₆alkyl-C₂₋₉heterocycloalkyl, C₂₋₉heteroaryl, and —C₁₋₆alkyl-C₂₋₉heteroaryl, wherein C₁₋₆alkyl, phenyl, —C₁₋₆alkyl-phenyl, —C₁₋₆alkyl-C₂₋₉heterocycloalkyl, C₂₋₉heteroaryl, and —C₁₋₆alkyl-C₂₋₉heteroaryl are optionally substituted with one or two groups independently selected from C₁₋₆alkyl, —OR¹, —N(R¹¹)₂, C₁₋₆alkyl, C₃₋₈cycloalkyl, —C(O)R¹², and —C(O)OR¹²;
[0620] each R¹⁰ is independently selected from H, C₁₋₆alkyl, C₁₋₆haloalkyl, C₃₋₈cycloalkyl, —C₁₋₆alkyl-C₃₋₈cycloalkyl, phenyl, —C₁₋₆alkyl-phenyl, and C₂₋₉heteroaryl, wherein C₁₋₆alkyl, phenyl, —C₁₋₆alkyl-phenyl, and C₂₋₉heteroaryl are optionally substituted with one or two groups independently selected from halogen, C₁₋₆alkyl, and —N(R¹¹)₂; or two R¹⁰ and the nitrogen atom to which they are attached are combined to form a 5- or 6-membered heterocycloalkyl ring optionally substituted with one, two, or three groups independently selected from C₁₋₆alkyl, oxo, and —C(O)OH;
[0621] each R¹¹ is independently selected from H and C₁₋₆alkyl;
[0622] each R¹² is independently selected from H and C₁₋₆alkyl;
[0623] p is 0, 1, 2, or 3; and
[0624] q is 0, 1, 2, 3, or 4;

[0625] or a pharmaceutically acceptable salt or solvate thereof.

[0626] In some instances, the small molecule that binds GPR35 is a compound of Formula (XVIII):

[chemical structure]

[0627] wherein:
[0628] R¹ is selected from —C(O)OH, —C(O)OR¹⁰

[chemical structure]

[0629] R² is independently selected from H, halogen, —CN, —OH, —OR⁹, —SR⁹, —N(R¹⁰)₂, —S(O)R⁹, —S(O)₂R⁹, —NHS(O)₂R⁹, —S(O)₂N(R¹⁰)₂, —C(O)R⁹, —C(O)OR¹⁰, —OC(O)R⁹, —C(O)N(R¹⁰)₂, —OC(O)N(R¹⁰)₂, —NR¹⁰C(O)N(R¹⁰)₂, —NR¹⁰C(O)R⁹, —NR¹⁰C(O)OR⁹, C₁₋₆alkyl, —C₁₋₆alkyl-OH, —C₁₋₆alkyl-OR⁹, —C₁₋₆alkyl-N(R¹⁰)₂, C₂₋₆alkenyl, C₂₋₆alkynyl, C₁₋₆haloalkyl, C₃₋₈cycloalkyl, and —C₁₋₆alkyl-C₃₋₈cycloalkyl;
[0630] each R³ is independently selected from halogen, —CN, —OH, —OR⁹, —SR⁹, —N(R¹⁰)₂, —S(O)R⁹, —S(O)₂R⁹, —NHS(O)₂R⁹, —S(O)₂N(R¹⁰)₂, —C(O)R⁹, —C(O)OR¹⁰, —OC(O)R⁹, —C(O)N(R¹⁰)₂, —OC(O)N(R¹⁰)₂, —NR¹⁰C(O)N(R¹⁰)₂, —NR¹⁰C(O)R⁹, —NR¹⁰C(O)OR⁹, C₁₋₆alkyl, —C₁₋₆alkyl-OH, —C₁₋₆alkyl-OR⁹, —C₁₋₆alkyl-N(R¹⁰)₂, C₂₋₆alkenyl, C₂₋₆alkynyl, C₁₋₆haloalkyl, C₃₋₈cycloalkyl, and —C₁₋₆alkyl-C₃₋₈cycloalkyl;
[0631] each R⁹ is independently selected from C₁₋₆alkyl, C₁₋₆haloalkyl, C₃₋₈cycloalkyl, —C₁₋₆alkyl-C₃₋₈cycloalkyl, phenyl, —C₁₋₆alkyl-phenyl, C₂₋₉heterocycloalkyl, —C₁₋₆alkyl-C₂₋₉heterocycloalkyl, C₂₋₉heteroaryl, and —C₁₋₆alkyl-C₂₋₉heteroaryl, wherein C₁₋₆alkyl, phenyl, —C₁₋₆alkyl-phenyl, —C₁₋₆alkyl-C₂₋₉heterocycloalkyl, C₂₋₉heteroaryl, and —C₁₋₆alkyl-C₂₋₉heteroaryl are optionally substituted with one or two groups independently selected from C₁₋₆alkyl, —OR¹, —N(R¹¹)₂, C₁₋₆alkyl, C₃₋₈cycloalkyl, —C(O)R¹², and —C(O)OR¹²;
[0632] each R¹⁰ is independently selected from H, C₁₋₆alkyl, C₁₋₆haloalkyl, C₃₋₈cycloalkyl, —C₁₋₆alkyl-C₃₋₈cycloalkyl, phenyl, —C₁₋₆alkyl-phenyl, and C₂₋₉heteroaryl, wherein C₁₋₆alkyl, phenyl, —C₁₋₆alkyl-phenyl, and C₂₋₉heteroaryl are optionally substituted with one or two groups independently selected from halogen, C₁₋₆alkyl, and —N(R¹¹)₂; or two R¹⁰ and the nitrogen atom to which they are attached are combined to form a 5- or 6-membered heterocycloalkyl ring optionally substituted with one, two, or three groups independently selected from C₁₋₆alkyl, oxo, and —C(O)OH;
[0633] each R¹¹ is independently selected from H and C₁₋₆alkyl;
[0634] each R¹² is independently selected from H and C₁₋₆alkyl; and
[0635] p is 0, 1, 2, 3, or 4;

[0636] or a pharmaceutically acceptable salt or solvate thereof.

[0637] In some instances, the small molecule that binds GPR35 is a compound of Formula (XIX):

[chemical structure]

[0638] wherein:
[0639] X is selected from —O—, —S—, and —NR¹³—;
[0640] R¹ is selected from H and C₁₋₆alkyl;
[0641] R² is independently selected from H, halogen, —CN, —OH, —OR⁹, —SR⁹, —N(R¹⁰)₂, —S(O)R⁹, —S(O)₂R⁹, —NHS(O)₂R⁹, —S(O)₂N(R¹⁰)₂, —C(O)R⁹, —C(O)OR¹⁰, —OC(O)R⁹, —C(O)N(R¹⁰)₂, —OC(O)N(R¹⁰)₂, —NR¹⁰C(O)N(R¹⁰)₂, —NR¹⁰C(O)R⁹, —NR¹⁰C(O)OR⁹, C₁₋₆alkyl, —C₁₋₆alkyl-OH, —C₁₋₆alkyl-OR⁹, —C₁₋₆alkyl-N(R¹⁰)₂, C₂₋₆alkenyl, C₂₋₆alkynyl, C₁₋₆haloalkyl, C₃₋₈cycloalkyl, and —C₁₋₆alkyl-C₃₋₈cycloalkyl;
[0642] R³ is selected from H, halogen, —CN, —OH, —OR⁹, —SR⁹, —N(R¹⁰)₂, —S(O)R⁹, —S(O)₂R⁹, —NHS(O)₂R⁹, —S(O)₂N(R¹⁰)₂, —C(O)R⁹, —C(O)OR¹⁰, —OC(O)R⁹, —C(O)N(R¹⁰)₂, —OC(O)N(R¹⁰)₂, —NR¹⁰C(O)N(R¹⁰)₂, —NR¹⁰C(O)R⁹, —NR¹⁰C(O)OR⁹, C₁₋₆alkyl, —C₁₋₆alkyl-OH, —C₁₋₆alkyl-OR⁹, —C₁₋₆alkyl-N(R¹⁰)₂, C₂₋₆alkenyl, C₂₋₆alkynyl, C₁₋₆haloalkyl, C₃₋₈cycloalkyl, and —C₁₋₆alkyl-C₃₋₈cycloalkyl;
[0643] each R⁴ is independently selected from halogen, —CN, —OH, —OR⁹, —SR⁹, —N(R¹⁰)₂, —S(O)R⁹, —S(O)₂R⁹, —NHS(O)₂R⁹, —S(O)₂N(R¹⁰)₂, —C(O)R⁹, —C(O)OR¹⁰, —OC(O)R⁹, —C(O)N(R¹⁰)₂, —OC(O)N(R¹⁰)₂, —NR¹⁰C(O)N(R¹⁰)₂, —NR¹⁰C(O)R⁹, —NR¹⁰C(O)OR⁹, C₁₋₆alkyl, —C₁₋₆alkyl-OH, —C₁₋₆alkyl-OR⁹, —C₁₋₆alkyl-N(R¹⁰)₂, C₂₋₆alkenyl, C₂₋₆alkynyl, C₁₋₆haloalkyl, C₃₋₈cycloalkyl, and —C₁₋₆alkyl-C₃₋₈cycloalkyl;
[0644] each R⁹ is independently selected from C₁₋₆alkyl, C₁₋₆haloalkyl, C₃₋₈cycloalkyl, —C₁₋₆alkyl-C₃₋₈cycloalkyl, phenyl, —C₁₋₆alkyl-phenyl, C₂₋₉heterocycloalkyl, —C₁₋₆alkyl-C₂₋₉heterocycloalkyl, C₂₋₉heteroaryl, and —C₁₋₆alkyl-C₂₋₉heteroaryl, wherein C₁₋₆alkyl, phenyl, —C₁₋₆alkyl-phenyl, —C₁₋₆alkyl-C₂₋₉heterocycloalkyl, C₂₋₉heteroaryl, and —C₁₋₆alkyl-C₂₋₉heteroaryl are optionally substituted with one or two groups independently selected from C₁₋₆alkyl, —OR¹, —N(R¹¹)₂, C₁₋₆alkyl, C₃₋₈cycloalkyl, —C(O)R¹², and —C(O)OR¹²;
[0645] each R¹⁰ is independently selected from H, C₁₋₆alkyl, C₁₋₆haloalkyl, C₃₋₈cycloalkyl, —C₁₋₆alkyl-C₃₋₈cycloalkyl, phenyl, —C₁₋₆alkyl-phenyl, and C₂₋₉heteroaryl, wherein C₁₋₆alkyl, phenyl, —C₁₋₆alkyl-phenyl, and C₂₋₉heteroaryl are optionally substituted with one or two groups independently selected from halogen, C₁₋₆alkyl, and —N(R¹¹)₂; or two R¹⁰ and the nitrogen atom to which they are attached are combined to form a 5- or 6-membered heterocycloalkyl ring optionally substituted with one, two, or three groups independently selected from C₁₋₆alkyl, oxo, and —C(O)OH;
[0646] each R¹¹ is independently selected from H and C₁₋₆alkyl;
[0647] each R¹² is independently selected from H and C₁₋₆alkyl;
[0648] R¹³ is selected from H, C₁₋₆alkyl, C₁₋₆haloalkyl, C₃₋₈cycloalkyl, —C₁₋₆alkyl-C₃₋₈cycloalkyl, phenyl, —C₁₋₆alkyl-phenyl, and C₂₋₉heteroaryl; and
[0649] p is 0, 1, 2, 3, or 4;

[0650] or a pharmaceutically acceptable salt or solvate thereof.

[0651] In some instances, the small molecule that binds GPR35 is a compound of Formula (XX):

[chemical structure]

[0652] wherein
[0653] X is selected from —O— and —C(R¹⁴)₂—;
[0654] R¹ is selected from H, halogen, —CN, —OH, —OR⁹, —SR⁹, —N(R¹⁰)₂, —S(O)R⁹, —S(O)₂R⁹, —NHS(O)₂R⁹, —S(O)₂N(R¹⁰)₂, —C(O)R⁹, —C(O)OR¹⁰, —OC(O)R⁹, —C(O)N(R¹⁰)₂, —OC(O)N(R¹⁰)₂, —NR¹⁰C(O)N(R¹⁰)₂, —NR¹⁰C(O)R⁹, —NR¹⁰C(O)OR⁹, C₁₋₆alkyl, —C₁₋₆alkyl-OH, —C₁₋₆alkyl-OR⁹, —C₁₋₆alkyl-N(R¹⁰)₂, C₂₋₆alkenyl, C₂₋₆alkynyl, C₁₋₆haloalkyl, C₃₋₈cycloalkyl, and —C₁₋₆alkyl-C₃₋₈cycloalkyl;
[0655] R² is selected from H, halogen, —CN, —OH, —OR⁹, —SR⁹, —N(R¹⁰)₂, —S(O)R⁹, —S(O)₂R⁹, —NHS(O)₂R⁹, —S(O)₂N(R¹⁰)₂, —C(O)R⁹, —C(O)OR¹⁰, —OC(O)R⁹, —C(O)N(R¹⁰)₂, —OC(O)N(R¹⁰)₂, —NR¹⁰C(O)N(R¹⁰)₂, —NR¹⁰C(O)R⁹, —NR¹⁰C(O)OR⁹, C₁₋₆alkyl, —C₁₋₆alkyl-OH, —C₁₋₆alkyl-OR⁹, —C₁₋₆alkyl-N(R¹⁰)₂, C₂₋₆alkenyl, C₂₋₆alkynyl, C₁₋₆haloalkyl, C₃₋₈cycloalkyl, and —C₁₋₆alkyl-C₃₋₈cycloalkyl;
[0656] each R³ and each R⁴ is selected from H, halogen, —CN, —OH, —OR⁹, —SR⁹, —N(R¹⁰)₂, —S(O)R⁹, —S(O)₂R⁹, —NHS(O)₂R⁹, —S(O)₂N(R¹⁰)₂, —C(O)R⁹, —C(O)OR¹⁰, —OC(O)R⁹, —C(O)N(R¹⁰)₂, —OC(O)N(R¹⁰)₂, —NR¹⁰C(O)N(R¹⁰)₂, —NR¹⁰C(O)R⁹, —NR¹⁰C(O)OR⁹, C₁₋₆alkyl, —C₁₋₆alkyl-OH, —C₁₋₆alkyl-OR⁹, —C₁₋₆alkyl-N(R¹⁰)₂, C₂₋₆alkenyl, C₂₋₆alkynyl, C₁₋₆haloalkyl, C₃₋₈cycloalkyl, and —C₁₋₆alkyl-C₃₋₈cycloalkyl;
[0657] each R⁹ is independently selected from C₁₋₆alkyl, C₁₋₆haloalkyl, C₃₋₈cycloalkyl, —C₁₋₆alkyl-C₃₋₈cycloalkyl, phenyl, —C₁₋₆alkyl-phenyl, C₂₋₉heterocycloalkyl, —C₁₋₆alkyl-C₂₋₉heterocycloalkyl, C₂₋₉heteroaryl, and —C₁₋₆alkyl-C₂₋₉heteroaryl, wherein C₁₋₆alkyl, phenyl, —C₁₋₆alkyl-phenyl, —C₁₋₆alkyl-C₂₋₉heterocycloalkyl, C₂₋₉heteroaryl, and —C₁₋₆alkyl-C₂₋₉heteroaryl are optionally substituted with one or two groups independently selected from C₁₋₆alkyl, —OR¹¹, —N(R¹¹)₂, C₁₋₆alkyl, C₃₋₈cycloalkyl, —C(O)R¹², and —C(O)OR¹²;
[0658] each R¹⁰ is independently selected from H, C₁₋₆alkyl, C₁₋₆haloalkyl, C₃₋₈cycloalkyl, —C₁₋₆alkyl-C₃₋₈cycloalkyl, phenyl, —C₁₋₆alkyl-phenyl, and C₂₋₉heteroaryl, wherein C₁₋₆alkyl, phenyl, —C₁₋₆alkyl-phenyl, and C₂₋₉heteroaryl are optionally substituted with one or two groups independently selected from halogen, C₁₋₆alkyl, and —N(R¹¹)₂; or two R¹⁰ and the nitrogen atom to which they are attached are combined to form a 5- or 6-membered heterocycloalkyl ring optionally substituted with one, two, or three groups independently selected from C₁₋₆alkyl, oxo, and —C(O)OH;
[0659] each R¹¹ is independently selected from H and C₁₋₆alkyl;
[0660] each R¹² is independently selected from H and C₁₋₆alkyl;
[0661] each R¹⁴ is independently selected from H, halogen, C₁₋₆alkyl, C₁₋₆haloalkyl, C₃₋₈cycloalkyl, —C₁₋₆alkyl-C₃₋₈cycloalkyl, phenyl, —C₁₋₆alkyl-phenyl, C₂₋₉heterocycloalkyl, —C₁₋₆alkyl-C₂₋₉heterocycloalkyl, C₂₋₉heteroaryl, and —C₁₋₆alkyl-C₂₋₉heteroaryl; and

[0662] or a pharmaceutically acceptable salt or solvate thereof.

[0663] In some instances, the small molecule that binds GPR35 is a compound of Formula (XXI):

[chemical structure]

[0664] wherein:
[0665] X¹ and X² are independently selected from —O— and —S—;
[0666] each R¹ and each R² are independently selected from halogen, —CN, —OH, —OR⁹, —SR⁹, —N(R¹⁰)₂, —S(O)R⁹, —S(O)₂R⁹, —NHS(O)₂R⁹, —S(O)₂N(R¹⁰)₂, —C(O)R⁹, —C(O)OR¹⁰, —OC(O)R⁹, —C(O)N(R¹⁰)₂, —OC(O)N(R¹⁰)₂, —NR¹⁰C(O)N(R¹⁰)₂, —NR¹⁰C(O)R⁹, —NR¹⁰C(O)OR⁹, C₁₋₆alkyl, —C₁₋₆alkyl-OH, —C₁₋₆alkyl-OR⁹, —C₁₋₆alkyl-N(R¹⁰)₂, C₂₋₆alkenyl, C₂₋₆alkynyl, C₁₋₆haloalkyl, C₃₋₈cycloalkyl, and —C₁₋₆alkyl-C₃₋₈cycloalkyl;
[0667] each R⁹ is independently selected from C₁₋₆alkyl, C₁₋₆haloalkyl, C₃₋₈cycloalkyl, —C₁₋₆alkyl-C₃₋₈cycloalkyl, phenyl, —C₁₋₆alkyl-phenyl, C₂₋₉heterocycloalkyl, —C₁₋₆alkyl-C₂₋₉heterocycloalkyl, C₂₋₉heteroaryl, and —C₁₋₆alkyl-C₂₋₉heteroaryl, wherein C₁₋₆alkyl, phenyl, —C₁₋₆alkyl-phenyl, —C₁₋₆alkyl-C₂₋₉heterocycloalkyl, C₂₋₉heteroaryl, and —C₁₋₆alkyl-C₂₋₉heteroaryl are optionally substituted with one or two groups independently selected from C₁₋₆alkyl, —OR¹, —N(R¹¹)₂, C₁₋₆alkyl, C₃₋₈cycloalkyl, —C(O)R¹², and —C(O)OR¹²;
[0668] each R¹⁰ is independently selected from H, C₁₋₆alkyl, C₁₋₆haloalkyl, C₃₋₈cycloalkyl, —C₁₋₆alkyl-C₃₋₈cycloalkyl, phenyl, —C₁₋₆alkyl-phenyl, and C₂₋₉heteroaryl, wherein C₁₋₆alkyl, phenyl, —C₁₋₆alkyl-phenyl, and C₂₋₉heteroaryl are optionally substituted with one or two groups independently selected from halogen, C₁₋₆alkyl, and —N(R¹¹)₂; or two R¹⁰ and the nitrogen atom to which they are attached are combined to form a 5- or 6-membered heterocycloalkyl ring optionally substituted with one, two, or three groups independently selected from C₁₋₆alkyl, oxo, and —C(O)OH;
[0669] each R¹¹ is independently selected from H and C₁₋₆alkyl;
[0670] each R¹² is independently selected from H and C₁₋₆alkyl;
[0671] R¹³ is selected from H, C₁₋₆alkyl, C₁₋₆haloalkyl, C₃₋₈cycloalkyl, —C₁₋₆alkyl-C₃₋₈cycloalkyl, phenyl, —C₁₋₆alkyl-phenyl, and C₂₋₉heteroaryl;
[0672] p is 0, 1, 2, or 3;
[0673] q is 0, 1, 2, or 3; and

[0674] or a pharmaceutically acceptable salt or solvate thereof.

[0675] In some instances, the small molecule that binds GPR35 is a compound of Formula (XXII):

[chemical structure]

[0676] wherein:
[0677] X is selected from —O— and —S—;
[0678] R¹, R², and R³ are independently selected from H, halogen, —CN, —OH, —OR⁹, —SR⁹, —N(R¹⁰)₂, —S(O)R⁹, —S(O)₂R⁹, —NHS(O)₂R⁹, —S(O)₂N(R¹⁰)₂, —C(O)R⁹, —C(O)OR¹⁰, —OC(O)R⁹, —C(O)N(R¹⁰)₂, —OC(O)N(R¹⁰)₂, —NR¹⁰C(O)N(R¹⁰)₂, —NR¹⁰C(O)R⁹, —NR¹⁰C(O)OR⁹, C₁₋₆alkyl, —C₁₋₆alkyl-OH, —C₁₋₆alkyl-OR⁹, —C₁₋₆alkyl-N(R¹⁰)₂, C₂₋₆alkenyl, C₂₋₆alkynyl, C₁₋₆haloalkyl, C₃₋₈cycloalkyl, and —C₁₋₆alkyl-C₃₋₈cycloalkyl;
[0679] each R⁴ is selected from halogen, —CN, —OH, —OR⁹, —SR⁹, —N(R¹⁰)₂, —S(O)R⁹, —S(O)₂R⁹, —NHS(O)₂R⁹, —S(O)₂N(R¹⁰)₂, —C(O)R⁹, —C(O)OR¹⁰, —OC(O)R⁹, —C(O)N(R¹⁰)₂, —OC(O)N(R¹⁰)₂, —NR¹⁰C(O)N(R¹⁰)₂, —NR¹⁰C(O)R⁹, —NR¹⁰C(O)OR⁹, C₁₋₆alkyl, —C₁₋₆alkyl-OH, —C₁₋₆alkyl-OR⁹, —C₁₋₆alkyl-N(R¹⁰)₂, C₂₋₆alkenyl, C₂₋₆alkynyl, C₁₋₆haloalkyl, C₃₋₈cycloalkyl, and —C₁₋₆alkyl-C₃₋₈cycloalkyl;
[0680] each R⁹ is independently selected from C₁₋₆alkyl, C₁₋₆haloalkyl, C₃₋₈cycloalkyl, —C₁₋₆alkyl-C₃₋₈cycloalkyl, phenyl, —C₁₋₆alkyl-phenyl, C₂₋₉heterocycloalkyl, —C₁₋₆alkyl-C₂₋₉heterocycloalkyl, C₂₋₉heteroaryl, and —C₁₋₆alkyl-C₂₋₉heteroaryl, wherein C₁₋₆alkyl, phenyl, —C₁₋₆alkyl-phenyl, —C₁₋₆alkyl-C₂₋₉heterocycloalkyl, C₂₋₉heteroaryl, and —C₁₋₆alkyl-C₂₋₉heteroaryl are optionally substituted with one or two groups independently selected from C₁₋₆alkyl, —OR¹¹, —N(R¹¹)₂, C₁₋₆ alkyl, C₃₋₈cycloalkyl, —C(O)R¹², and —C(O)OR¹²;
[0681] each R¹⁰ is independently selected from H, C₁₋₆alkyl, C₁₋₆haloalkyl, C₃₋₈cycloalkyl, —C₁₋₆alkyl-C₃₋₈cycloalkyl, phenyl, —C₁₋₆alkyl-phenyl, and C₂₋₉heteroaryl, wherein C₁₋₆alkyl, phenyl, —C₁₋₆alkyl-phenyl, and C₂₋₉heteroaryl are optionally substituted with one or two groups independently selected from halogen, C₁₋₆alkyl, and —N(R¹¹)₂; or two R¹⁰ and the nitrogen atom to which they are attached are combined to form a 5- or 6-membered heterocycloalkyl ring optionally substituted with one, two, or three groups independently selected from C₁₋₆alkyl, oxo, and —C(O)OH;
[0682] each R¹¹ is independently selected from H and C₁₋₆alkyl;
[0683] each R¹² is independently selected from H and C₁₋₆alkyl; and
[0684] p is 0, 1, 2, 3, or 4;

[0685] or a pharmaceutically acceptable salt or solvate thereof.

[0686] In some instances, the small molecule that binds GPR35 is a compound of Formula (XXIII):

[chemical structure]

[0687] wherein:
[0688] each X is independently selected from —O— and —S—;

[0689] R¹ is selected from —C(O)OH, —C(O)OR¹⁰,

[chemical structure]

[0690] each R² is selected from halogen, —CN, —OH, —OR⁹, —SR⁹, —N(R¹⁰)₂, —S(O)R⁹, —S(O)₂R⁹, —NHS(O)₂R⁹, —S(O)₂N(R¹⁰)₂, —C(O)R⁹, —C(O)OR¹⁰, —OC(O)R⁹, —C(O)N(R¹⁰)₂, —OC(O)N(R¹⁰)₂, —NR¹⁰C(O)N(R¹⁰)₂, —NR¹⁰C(O)R⁹, —NR¹⁰C(O)OR⁹, C₁₋₆alkyl, —C₁₋₆alkyl-OH, —C₁₋₆alkyl-OR⁹, —C₁₋₆alkyl-N(R¹⁰)₂, C₂₋₆alkenyl, C₂₋₆alkynyl, C₁₋₆haloalkyl, C₃₋₈cycloalkyl, and —C₁₋₆alkyl-C₃₋₈cycloalkyl;
[0691] R³ is selected from H, C₁₋₆alkyl, C₁₋₆haloalkyl, C₃₋₈cycloalkyl, —C₁₋₆alkyl-C₃₋₈cycloalkyl, phenyl, —C₁₋₆alkyl-phenyl, and C₂₋₉heteroaryl;
[0692] each R⁴ and each R⁵ are independently selected from H, halogen, —CN, —OH, —OR⁹, —SR⁹, —N(R¹⁰)₂, —S(O)R⁹, —S(O)₂R⁹, —NHS(O)₂R⁹, —S(O)₂N(R¹⁰)₂, —C(O)R⁹, —C(O)OR¹⁰, —OC(O)R⁹, —C(O)N(R¹⁰)₂, —OC(O)N(R¹⁰)₂, —NR¹⁰C(O)N(R¹⁰)₂, —NR¹⁰C(O)R⁹, —NR¹⁰C(O)OR⁹, C₁₋₆alkyl, —C₁₋₆alkyl-OH, —C₁₋₆alkyl-OR⁹, —C₁₋₆alkyl-N(R¹⁰)₂, C₂₋₆alkenyl, C₂₋₆alkynyl, C₁₋₆haloalkyl, C₃₋₈cycloalkyl, and —C₁₋₆alkyl-C₃₋₈cycloalkyl;
[0693] R⁶ is selected from C₃₋₈cycloalkyl, C₂₋₉heterocycloalkyl, C₂₋₉heteroaryl, and phenyl, wherein C₃₋₈cycloalkyl, C₂₋₉heterocycloalkyl, C₂₋₉heteroaryl, and phenyl are optionally substituted with one or two groups independently selected from C₁₋₆alkyl, —OR¹¹, —N(R¹¹)₂, C₁₋₆alkyl, C₃₋₈cycloalkyl, —C(O)R¹², and —C(O)OR¹²;
[0694] each R⁹ is independently selected from C₁₋₆alkyl, C₁₋₆haloalkyl, C₃₋₈cycloalkyl, —C₁₋₆alkyl-C₃₋₈cycloalkyl, phenyl, —C₁₋₆alkyl-phenyl, C₂₋₉heterocycloalkyl, —C₁₋₆alkyl-C₂₋₉heterocycloalkyl, C₂₋₉heteroaryl, and —C₁₋₆alkyl-C₂₋₉heteroaryl, wherein C₁₋₆alkyl, phenyl, —C₁₋₆alkyl-phenyl, —C₁₋₆ alkyl-C₂₋₉heterocycloalkyl, C₂₋₉heteroaryl, and —C₁₋₆alkyl-C₂₋₉heteroaryl are optionally substituted with one or two groups independently selected from C₁₋₆alkyl, —OR¹, —N(R¹¹)₂, C₁₋₆ alkyl, C₃₋₈cycloalkyl, —C(O)R¹², and —C(O)OR¹²;
[0695] each R¹⁰ is independently selected from H, C₁₋₆alkyl, C₁₋₆haloalkyl, C₃₋₈cycloalkyl, —C₁₋₆alkyl-C₃₋₈cycloalkyl, phenyl, —C₁₋₆alkyl-phenyl, and C₂₋₉heteroaryl, wherein C₁₋₆alkyl, phenyl, —C₁₋₆alkyl-phenyl, and C₂₋₉heteroaryl are optionally substituted with one or two groups independently selected from halogen, C₁₋₆alkyl, and —N(R¹¹)₂; or two R¹⁰ and the nitrogen atom to which they are attached are combined to form a 5- or 6-membered heterocycloalkyl ring optionally substituted with one, two, or three groups independently selected from C₁₋₆alkyl, oxo, and —C(O)OH;
[0696] each R¹¹ is independently selected from H and C₁₋₆alkyl;
[0697] each R¹² is independently selected from H and C₁₋₆alkyl; and
[0698] p is 0, 1, 2, 3, or 4;

[0699] or a pharmaceutically acceptable salt or solvate thereof.

[0700] In some instances, the small molecule that binds GPR35 is a compound of Formula (XXIV):

[chemical structure]

[0701] wherein:
[0702] X is selected from —O— and —S—;
[0703] R¹ is selected from —C(O)OH, —C(O)OR¹⁰,

[chemical structure]

[0704] each R² is selected from H, halogen, —CN, —OH, —OR⁹, —SR⁹, —N(R¹⁰)₂, —S(O)R⁹, —S(O)₂R⁹, —NHS(O)₂R⁹, —S(O)₂N(R¹⁰)₂, —C(O)R⁹, —C(O)OR¹⁰, —OC(O)R⁹, —C(O)N(R¹⁰)₂, —OC(O)N(R¹⁰)₂, —NR¹⁰C(O)N(R¹⁰)₂, —NR¹⁰C(O)R⁹, —NR¹⁰C(O)OR⁹, C₁₋₆alkyl, —C₁₋₆alkyl-OH, —C₁₋₆alkyl-OR⁹, —C₁₋₆alkyl-N(R¹⁰)₂, C₂₋₆alkenyl, C₂₋₆alkynyl, C₁₋₆haloalkyl, C₃₋₈cycloalkyl, and —C₁₋₆alkyl-C₃₋₈cycloalkyl;
[0705] each R³ is selected from halogen, —CN, —OH, —OR⁹, —SR⁹, —N(R¹⁰)₂, —S(O)R⁹, —S(O)₂R⁹, —NHS(O)₂R⁹, —S(O)₂N(R¹⁰)₂, —C(O)R⁹, —C(O)OR¹⁰, —OC(O)R⁹, —C(O)N(R¹⁰)₂, —OC(O)N(R¹⁰)₂, —NR¹⁰C(O)N(R¹⁰)₂, —NR¹⁰C(O)R⁹, —NR¹⁰C(O)OR⁹, C₁₋₆alkyl, —C₁₋₆alkyl-OH, —C₁₋₆alkyl-OR⁹, —C₁₋₆alkyl-N(R¹⁰)₂, C₂₋₆alkenyl, C₂₋₆alkynyl, C₁₋₆haloalkyl, C₃₋₈cycloalkyl, and —C₁₋₆alkyl-C₃₋₈cycloalkyl;
[0706] R⁴ is selected from H, C₁₋₆alkyl, C₁₋₆haloalkyl, and C₃₋₈cycloalkyl;
[0707] R⁵ is selected from H, C₁₋₆alkyl, C₁₋₆haloalkyl, C₃₋₈cycloalkyl, —C₁₋₆alkyl-C₃₋₈cycloalkyl, phenyl, —C₁₋₆alkyl-phenyl, and C₂₋₉heteroaryl;
[0708] R⁶ is independently selected from H, C₁₋₆alkyl, C₁₋₆haloalkyl, C₃₋₈cycloalkyl, —C₁₋₆alkyl-C₃₋₈cycloalkyl, phenyl, —C₁₋₆alkyl-phenyl, and C₂₋₉heteroaryl;
[0709] each R⁹ is independently selected from C₁₋₆alkyl, C₁₋₆haloalkyl, C₃₋₈cycloalkyl, —C₁₋₆alkyl-C₃₋₈cycloalkyl, phenyl, —C₁₋₆alkyl-phenyl, C₂₋₉heterocycloalkyl, —C₁₋₆alkyl-C₂₋₉heterocycloalkyl, C₂₋₉heteroaryl, and —C₁₋₆alkyl-C₂₋₉heteroaryl, wherein C₁₋₆alkyl, phenyl, —C₁₋₆alkyl-phenyl, —C₁₋₆alkyl-C₂₋₉heterocycloalkyl, C₂₋₉heteroaryl, and —C₁₋₆alkyl-C₂₋₉heteroaryl are optionally substituted with one or two groups independently selected from C₁₋₆alkyl, —OR¹, —N(R¹¹)₂, C₁₋₆alkyl, C₃₋₈cycloalkyl, —C(O)R¹², and —C(O)OR¹²;
[0710] each R¹⁰ is independently selected from H, C₁₋₆alkyl, C₁₋₆haloalkyl, C₃₋₈cycloalkyl, —C₁₋₆alkyl-C₃₋₈cycloalkyl, phenyl, —C₁₋₆alkyl-phenyl, and C₂₋₉heteroaryl, wherein C₁₋₆alkyl, phenyl, —C₁₋₆alkyl-phenyl, and C₂₋₉heteroaryl are optionally substituted with one or two groups independently selected from halogen, C₁₋₆alkyl, and —N(R¹¹)₂; or two R¹⁰ and the nitrogen atom to which they are attached are combined to form a 5- or 6-membered heterocycloalkyl ring optionally substituted with one, two, or three groups independently selected from C₁₋₆alkyl, oxo, and —C(O)OH;
[0711] each R¹¹ is independently selected from H and C₁₋₆alkyl;
[0712] each R¹² is independently selected from H and C₁₋₆alkyl; and
[0713] p is 0, 1, 2, 3, or 4;

[0714] or a pharmaceutically acceptable salt or solvate thereof.

[0715] In some instances, the small molecule that binds GPR35 is a compound of Formula (XXV):

[chemical structure]

[0716] wherein:
[0717] X is selected from CR² or N;
[0718] R¹ is selected from C₃₋₈cycloalkyl, C₂₋₉heterocycloalkyl, C₂₋₉heteroaryl, and phenyl, wherein C₃₋₈cycloalkyl, C₂₋₉heterocycloalkyl, C₂₋₉heteroaryl, and phenyl are optionally substituted with one or two groups independently selected from C₁₋₆alkyl, —OR¹, —N(R¹¹)₂, C₁₋₆alkyl, C₃₋₈cycloalkyl, —C(O)R¹², and —C(O)OR¹²;
[0719] each R² and each R⁶ is selected from halogen, —CN, —OH, —OR⁹, —SR⁹, —N(R¹⁰)₂, —S(O)R⁹, —S(O)₂R⁹, —NHS(O)₂R⁹, —S(O)₂N(R¹⁰)₂, —C(O)R⁹, —C(O)OR¹⁰, —OC(O)R⁹, —C(O)N(R¹⁰)₂, —OC(O)N(R¹⁰)₂, —NR¹⁰C(O)N(R¹⁰)₂, —NR¹⁰C(O)R⁹, —NR¹⁰C(O)OR⁹, C₁₋₆alkyl, —C₁₋₆alkyl-OH, —C₁₋₆alkyl-OR⁹, —C₁₋₆alkyl-N(R¹⁰)₂, C₂₋₆alkenyl, C₂₋₆alkynyl, C₁₋₆haloalkyl, C₃₋₈cycloalkyl, and —C₁₋₆alkyl-C₃₋₈cycloalkyl;
[0720] R³ and R⁴ are independently selected from H, halogen, —CN, —OH, —OR⁹, —SR⁹, —N(R¹⁰)₂, —S(O)R⁹, —S(O)₂R⁹, —NHS(O)₂R⁹, —S(O)₂N(R¹⁰)₂, —C(O)R⁹, —C(O)OR¹⁰, —OC(O)R⁹, —C(O)N(R¹⁰)₂, —OC(O)N(R¹⁰)₂, —NR¹⁰C(O)N(R¹⁰)₂, —NR¹⁰C(O)R⁹, —NR¹⁰C(O)OR⁹, C₁₋₆alkyl, —C₁₋₆alkyl-OH, —C₁₋₆alkyl-OR⁹, —C₁₋₆alkyl-N(R¹⁰)₂, C₂₋₆alkenyl, C₂₋₆alkynyl, C₁₋₆haloalkyl, C₃₋₈cycloalkyl, and —C₁₋₆alkyl-C₃₋₈cycloalkyl;
[0721] each R⁵ are independently selected from H, halogen, —CN, —OH, —OR⁹, —SR⁹, —N(R¹⁰)₂, —S(O)R⁹, —S(O)₂R⁹, —NHS(O)₂R⁹, —S(O)₂N(R¹⁰)₂, —C(O)R⁹, —C(O)OR¹⁰, —OC(O)R⁹, —C(O)N(R¹⁰)₂, —OC(O)N(R¹⁰)₂, —NR¹⁰C(O)N(R¹⁰)₂, —NR¹⁰C(O)R⁹, —NR¹⁰C(O)OR⁹, C₁₋₆alkyl, —C₁₋₆alkyl-OH, —C₁₋₆alkyl-OR⁹, —C₁₋₆alkyl-N(R¹⁰)₂, C₂₋₆alkenyl, C₂₋₆alkynyl, C₁₋₆haloalkyl, C₃₋₈cycloalkyl, and —C₁₋₆alkyl-C₃₋₈cycloalkyl;
[0722] each R⁹ is independently selected from C₁₋₆alkyl, C₁₋₆haloalkyl, C₃₋₈cycloalkyl, —C₁₋₆alkyl-C₃₋₈cycloalkyl, phenyl, —C₁₋₆alkyl-phenyl, C₂₋₉heterocycloalkyl, —C₁₋₆alkyl-C₂₋₉heterocycloalkyl, C₂₋₉heteroaryl, and —C₁₋₆alkyl-C₂₋₉heteroaryl, wherein C₁₋₆alkyl, phenyl, —C₁₋₆alkyl-phenyl, —C₁₋₆alkyl-C₂₋₉heterocycloalkyl, C₂₋₉heteroaryl, and —C₁₋₆alkyl-C₂₋₉heteroaryl are optionally substituted with one or two groups independently selected from C₁₋₆alkyl, —OR¹, —N(R¹¹)₂, C₁₋₆alkyl, C₃₋₈cycloalkyl, —C(O)R¹², and —C(O)OR¹²;
[0723] each R¹⁰ is independently selected from H, C₁₋₆alkyl, C₁₋₆haloalkyl, C₃₋₈cycloalkyl, —C₁₋₆alkyl-C₃₋₈cycloalkyl, phenyl, —C₁₋₆alkyl-phenyl, and C₂₋₉heteroaryl, wherein C₁₋₆alkyl, phenyl, —C₁₋₆alkyl-phenyl, and C₂₋₉heteroaryl are optionally substituted with one or two groups independently selected from halogen, C₁₋₆alkyl, and —N(R¹¹)₂; or two R¹⁰ and the nitrogen atom to which they are attached are combined to form a 5- or 6-membered heterocycloalkyl ring optionally substituted with one, two, or three groups independently selected from C₁₋₆alkyl, oxo, and —C(O)OH;
[0724] each R¹¹ is independently selected from H and C₁₋₆alkyl;
[0725] each R¹² is independently selected from H and C₁₋₆alkyl;
[0726] p is 0, 1, 2, 3, 4, 5, or 6; and
[0727] q is 0, 1, 2, 3, or 4;

[0728] or a pharmaceutically acceptable salt or solvate thereof.

[0729] In some instances, the small molecule that binds GPR35 is a compound of Formula (XXVI):

[chemical structure]

[0730] wherein:
[0731] R¹ is selected from —C(O)OH, —C(O)OR¹⁰,

[chemical structure]

[0732] each R² is selected from halogen, —CN, —OH, —OR⁹, —SR⁹, —N(R¹⁰)₂, —S(O)R⁹, —S(O)₂R⁹, —NHS(O)₂R⁹, —S(O)₂N(R¹⁰)₂, —C(O)R⁹, —C(O)OR¹⁰, —OC(O)R⁹, —C(O)N(R¹⁰)₂, —OC(O)N(R¹⁰)₂, —NR¹⁰C(O)N(R¹⁰)₂, —NR¹⁰C(O)R⁹, —NR¹⁰C(O)OR⁹, C₁₋₆alkyl, —C₁₋₆alkyl-OH, —C₁₋₆alkyl-OR⁹, —C₁₋₆alkyl-N(R¹⁰)₂, C₂₋₆alkenyl, C₂₋₆alkynyl, C₁₋₆haloalkyl, C₃₋₈cycloalkyl, and —C₁₋₆alkyl-C₃₋₈cycloalkyl;
[0733] each R⁹ is independently selected from C₁₋₆alkyl, C₁₋₆haloalkyl, C₃₋₈cycloalkyl, —C₁₋₆alkyl-C₃₋₈cycloalkyl, phenyl, —C₁₋₆alkyl-phenyl, C₂₋₉heterocycloalkyl, —C₁₋₆alkyl-C₂₋₉heterocycloalkyl, C₂₋₉heteroaryl, and —C₁₋₆alkyl-C₂₋₉heteroaryl, wherein C₁₋₆alkyl, phenyl, —C₁₋₆alkyl-phenyl, —C₁₋₆alkyl-C₂₋₉heterocycloalkyl, C₂₋₉heteroaryl, and —C₁₋₆alkyl-C₂₋₉heteroaryl are optionally substituted with one or two groups independently selected from C₁₋₆alkyl, —OR¹¹, —N(R¹¹)₂, C₁₋₆ alkyl, C₃₋₈cycloalkyl, —C(O)R¹², and —C(O)OR¹²;
[0734] each R¹⁰ is independently selected from H, C₁₋₆alkyl, C₁₋₆haloalkyl, C₃₋₈cycloalkyl, —C₁₋₆alkyl-C₃₋₈cycloalkyl, phenyl, —C₁₋₆alkyl-phenyl, and C₂₋₉heteroaryl, wherein C₁₋₆alkyl, phenyl, —C₁₋₆alkyl-phenyl, and C₂₋₉heteroaryl are optionally substituted with one or two groups independently selected from halogen, C₁₋₆alkyl, and —N(R¹¹)₂; or two R¹⁰ and the nitrogen atom to which they are attached are combined to form a 5- or 6-membered heterocycloalkyl ring optionally substituted with one, two, or three groups independently selected from C₁₋₆ alkyl, oxo, and —C(O)OH;
[0735] each R¹¹ is independently selected from H and C₁₋₆alkyl;
[0736] each R¹² is independently selected from H and C₁₋₆alkyl;
[0737] p is 0, 1, 2, 3, or 4; and

[0738] or a pharmaceutically acceptable salt or solvate thereof.

[0739] In some instances, the small molecule that binds GPR35 is selected from zaprinast, lodoxamide, bufrolin, TC-G 1001, nedocromil, PSB-13253, 6-bromo-7-hydroxy-8-nitro-3-(1H-tetrazol-5-yl)-2H-chromen-2-one, 6-bromo-7-hydroxy-8-nitro-2-oxo-2H-chromene-3-carboxylic acid, 7-deshydroxypyrogallin-4-carboxylic acid (DCA), morin, cromolyn, T₃, reverse T₃, YE-210, cromoglicic acid, nedocromil, pamoic acid, and tyrphostin-51.

[0740] In some instances, the small molecule that binds GPR35 is selected from pamoic acid, amlexanox, furosemide, doxantrazole, kynurenic acid, DHICA, cyclic guanosine monophosphate (cGMP), 2,3,5-THB, ellagic acid, LPA species, and YE120.

[0741] In some instances, the small molecule that binds GPR35 is selected from ML-145, ML-194, and ML-144.

[0742] In some instances, the small molecule that binds GPR35 is selected from:

[chemical structure]

[chemical structure]

[0743] In some instances, the small molecule that binds GPR35 is selected from:

[chemical structure]

[chemical structure]

[0744] In some instances, the small molecule that binds GPR35 is selected from:

[chemical structure]

### TL1A Modulators

[0745] In some embodiments, the therapeutic agent comprises a modulator of Tumor Necrosis Factor Ligand TA (TL1A) (UniProtKB: 095150). In some embodiments, the modulator of TL1A is an antagonist of TL1A. In some embodiments the therapeutic agent comprises an inhibitor of TL1A expression or activity. In some cases, the inhibitor of TL1A expression or activity is effective to inhibit TL1A-DR3 binding. In some embodiments, the inhibitor of TL1A expression or activity comprises an allosteric modulator of TL1A. An allosteric modulator of TL1A may indirectly influence the effects TL1A on DR3, or TR6/DcR3 on TL1A or DR3. The inhibitor of TL1A expression or activity may be a direct inhibitor or indirect inhibitor. Non-limiting examples of an inhibitor of TL1A expression include RNA to protein TL1A translation inhibitors, antisense oligonucleotides targeting the TNFSF15 mRNA (such as miRNAs, or siRNA), epigenetic editing (such as targeting the DNA-binding domain of TNFSF15, or post-translational modifications of histone tails and/or DNA molecules). Non-limiting examples of an inhibitor of TL1A activity include antagonists to the TL1A receptors, (DR3 and TR6/DcR3), antagonists to TL1A antigen, and antagonists to gene expression products involved in TL1A mediated disease. Antagonists as disclosed herein, may include, but are not limited to, an anti-TL1A antibody, an anti-TL1A-binding antibody fragment, or a small molecule. The small molecule may be a small molecule that binds to TL1A or DR3. The anti-TL1A antibody may be monoclonal or polyclonal. The anti-TL1A antibody may be humanized or chimeric. The anti-TL1A antibody may be a fusion protein. The anti-TL1A antibody may be a blocking anti-TL1A antibody. A blocking antibody blocks binding between two proteins, e.g., a ligand and its receptor. Therefore, a TL1A blocking antibody includes an antibody that prevents binding of TL1A to DR3 or TR6/DcR3 receptors. In a non-limiting example, the TL1A blocking antibody binds to DR3. In another example, the TL1A blocking antibody binds to DcR3. In some cases, the TL1A antibody is an anti-TL1A antibody that specifically binds to TL1A.

[0746] The anti-TL1A antibody, in some embodiments, specifically targets part of amino acid sequence provided in SEQ ID NO: 450, which is the human isoform VEGI-192 (NP_001191273.1). In some instances, the anti-TL1A antibody, specifically targets part of amino acid sequence provided in SEQ ID NO: 45, which is the human isoform VEGI0251 (NP 005109.2).

[0747] The anti-TL1A antibody may comprise one or more of the antibody sequences of Table 5. The anti-DR3 antibody may comprise an amino acid sequence that is at least 85% identical to any one of SEQ ID NOS: 10358-10370 and an amino acid sequence that is at least 85% identical to any one of SEQ ID NOS: 10371-10375. The anti-DR3 antibody may comprise an amino acid sequence comprising the HCDR1, HCDR2, HCDR3 domains of any one of SEQ ID NOS: 10358-10370 and the LCDR1, LCDR2, and LCDR3 domains of any one of SEQ ID NOS: 10371-10375.

[0748] In some embodiments, an anti-TL1A antibody comprises a heavy chain comprising three complementarity-determining regions: HCDR1, HCDR2, and HCDR3; and a light chain comprising three complementarity-determining regions: LCDR1, LCDR2, and LCDR3. In some embodiments, the anti-TL1A antibody comprises a HCDR1 comprising SEQ ID NO: 10209, a HCDR2 comprising SEQ ID NO: 10210, a HCDR3 comprising SEQ ID NO: 10211, a LCDR1 comprising SEQ ID NO: 10212, a LCDR2 comprising SEQ ID NO: 10213, and a LCDR3 comprising SEQ ID NO: 10214. In some cases, the anti-TL1A antibody comprises a heavy chain (HC) variable domain comprising SEQ ID NO: 10215 and a light chain (LC) variable domain comprising SEQ ID NO: 10216.

[0749] In some embodiments, the anti-TL1A antibody comprises a HCDR1 comprising SEQ ID NO: 10217, a HCDR2 comprising SEQ ID NO: 10218, a HCDR3 comprising SEQ ID NO: 10219, a LCDR1 comprising SEQ ID NO: 10220, a LCDR2 comprising SEQ ID NO: 10221, and a LCDR3 comprising SEQ ID NO: 10222. In some cases, the anti-TL1A antibody comprises a heavy chain (HC) variable domain comprising SEQ ID NO: 10223 and a light chain (LC) variable domain comprising SEQ ID NO: 10224.

[0750] In some embodiments, the anti-TL1A antibody comprises a HCDR1 comprising SEQ ID NO: 10225, a HCDR2 comprising SEQ ID NO: 10226, a HCDR3 comprising SEQ ID NO: 10227, a LCDR1 comprising SEQ ID NO: 10228, a LCDR2 comprising SEQ ID NO: 10229, and a LCDR3 comprising SEQ ID NO: 10230. In some cases, the anti-TL1A antibody comprises a heavy chain (HC) variable domain comprising SEQ ID NO: 10231 and a light chain (LC) variable domain comprising SEQ ID NO: 10232.

[0751] In some embodiments, the anti-TL1A antibody comprises a HCDR1 comprising SEQ ID NO: 10233, a HCDR2 comprising SEQ ID NO: 10234, a HCDR3 comprising SEQ ID NO: 10235, a LCDR1 comprising SEQ ID NO: 10239, a LCDR2 comprising SEQ ID NO: 10240, and a LCDR3 comprising SEQ ID NO: 10241. In some cases, the anti-TL1A antibody comprises a HCDR1 comprising SEQ ID NO: 102000136, a HCDR2 comprising SEQ ID NO: 10237, a HCDR3 comprising SEQ ID NO: 10238, a LCDR1 comprising SEQ ID NO: 10239, a LCDR2 comprising SEQ ID NO: 10240, and a LCDR3 comprising SEQ ID NO: 10241. In some cases, the anti-TL1A antibody comprises a heavy chain (HC) variable domain comprising SEQ ID NO: 10242 and a light chain (LC) variable domain comprising SEQ ID NO: 10243. In some cases, the anti-TL1A antibody comprises a heavy chain comprising SEQ ID NO: 10244. In some cases, the anti-TL1A antibody comprises a light chain comprising SEQ ID NO: 10245.

[0752] In some embodiments, the anti-TL1A antibody comprises a HCDR1 comprising SEQ ID NO: 10246, a HCDR2 comprising SEQ ID NO: 10247, a HCDR3 comprising SEQ ID NO: 10248, a LCDR1 comprising SEQ ID NO: 10249, a LCDR2 comprising SEQ ID NO: 10250, and a LCDR3 comprising SEQ ID NO: 10251. In some cases, the anti-TL1A antibody comprises a heavy chain (HC) variable domain comprising SEQ ID NO: 10252 and a light chain (LC) variable domain comprising SEQ ID NO: 10253.

[0753] In some embodiments, the anti-TL1A antibody comprises a HCDR1 comprising SEQ ID NO: 10254, a HCDR2 comprising SEQ ID NO: 10255, a HCDR3 comprising SEQ ID NO: 10256, a LCDR1 comprising SEQ ID NO: 10257, a LCDR2 comprising SEQ ID NO: 10258, and a LCDR3 comprising SEQ ID NO: 10259. In some cases, the anti-TL1A antibody comprises a heavy chain (HC) variable domain comprising SEQ ID NO: 10260 and a light chain (LC) variable domain comprising SEQ ID NO: 10261.

[0754] In some embodiments, the anti-TL1A antibody comprises a HCDR1 comprising SEQ ID NO: 10262, a HCDR2 comprising SEQ ID NO: 10264, a HCDR3 comprising SEQ ID NO: 10265, a LCDR1 comprising SEQ ID NO: 10267, a LCDR2 comprising SEQ ID NO: 10269, and a LCDR3 comprising SEQ ID NO: 10270. In some cases, the anti-TL1A antibody comprises a heavy chain (HC) variable domain comprising SEQ ID NO: 10271 and a light chain (LC) variable domain comprising SEQ ID NO: 10275. In some cases, the anti-TL1A antibody comprises a heavy chain (HC) variable domain comprising SEQ ID NO: 10271 and a light chain (LC) variable domain comprising SEQ ID NO: 10276. In some cases, the anti-TL1A antibody comprises a heavy chain (HC) variable domain comprising SEQ ID NO: 10271 and a light chain (LC) variable domain comprising SEQ ID NO: 10277. In some cases, the anti-TL1A antibody comprises a heavy chain (HC) variable domain comprising SEQ ID NO: 10271 and a light chain (LC) variable domain comprising SEQ ID NO: 10278.

[0755] In some embodiments, the anti-TL1A antibody comprises a HCDR1 comprising SEQ ID NO: 10262, a HCDR2 comprising SEQ ID NO: 10264, a HCDR3 comprising SEQ ID NO: 10265, a LCDR1 comprising SEQ ID NO: 10268, a LCDR2 comprising SEQ ID NO: 10269, and a LCDR3 comprising SEQ ID NO: 10270. In some cases, the anti-TL1A antibody comprises a heavy chain (HC) variable domain comprising SEQ ID NO: 10271 and a light chain (LC) variable domain comprising SEQ ID NO: 10279. In some cases, the anti-TL1A antibody comprises a heavy chain (HC) variable domain comprising SEQ ID NO: 10271 and a light chain (LC) variable domain comprising SEQ ID NO: 10280. In some cases, the anti-TL1A antibody comprises a heavy chain (HC) variable domain comprising SEQ ID NO: 10271 and a light chain (LC) variable domain comprising SEQ ID NO: 10281. In some cases, the anti-TL1A antibody comprises a heavy chain (HC) variable domain comprising SEQ ID NO: 10271 and a light chain (LC) variable domain comprising SEQ ID NO: 10282.

[0756] In some embodiments, the anti-TL1A antibody comprises a HCDR1 comprising SEQ ID NO: 10262, a HCDR2 comprising SEQ ID NO: 10264, a HCDR3 comprising SEQ ID NO: 10265, a LCDR1 comprising SEQ ID NO: 10267, a LCDR2 comprising SEQ ID NO: 10269, and a LCDR3 comprising SEQ ID NO: 10270. In some cases, the anti-TL1A antibody comprises a heavy chain (HC) variable domain comprising SEQ ID NO: 10272 and a light chain (LC) variable domain comprising SEQ ID NO: 10275. In some cases, the anti-TL1A antibody comprises a heavy chain (HC) variable domain comprising SEQ ID NO: 10272 and a light chain (LC) variable domain comprising SEQ ID NO: 10276. In some cases, the anti-TL1A antibody comprises a heavy chain (HC) variable domain comprising SEQ ID NO: 10272 and a light chain (LC) variable domain comprising SEQ ID NO: 10277. In some cases, the anti-TL1A antibody comprises a heavy chain (HC) variable domain comprising SEQ ID NO: 10272 and a light chain (LC) variable domain comprising SEQ ID NO: 10278.

[0757] In some embodiments, the anti-TL1A antibody comprises a HCDR1 comprising SEQ ID NO: 10262, a HCDR2 comprising SEQ ID NO: 10264, a HCDR3 comprising SEQ ID NO: 10265, a LCDR1 comprising SEQ ID NO: 10268, a LCDR2 comprising SEQ ID NO: 10269, and a LCDR3 comprising SEQ ID NO: 10270. In some cases, the anti-TL1A antibody comprises a heavy chain (HC) variable domain comprising SEQ ID NO: 10272 and a light chain (LC) variable domain comprising SEQ ID NO: 10279. In some cases, the anti-TL1A antibody comprises a heavy chain (HC) variable domain comprising SEQ ID NO: 10272 and a light chain (LC) variable domain comprising SEQ ID NO: 10280. In some cases, the anti-TL1A antibody comprises a heavy chain (HC) variable domain comprising SEQ ID NO: 10272 and a light chain (LC) variable domain comprising SEQ ID NO: 10281. In some cases, the anti-TL1A antibody comprises a heavy chain (HC) variable domain comprising SEQ ID NO: 10272 and a light chain (LC) variable domain comprising SEQ ID NO: 10282.

[0758] In some embodiments, the anti-TL1A antibody comprises a HCDR1 comprising SEQ ID NO: 10263, a HCDR2 comprising SEQ ID NO: 10264, a HCDR3 comprising SEQ ID NO: 10266, a LCDR1 comprising SEQ ID NO: 10267, a LCDR2 comprising SEQ ID NO: 10269, and a LCDR3 comprising SEQ ID NO: 10270. In some cases, the anti-TL1A antibody comprises a heavy chain (HC) variable domain comprising SEQ ID NO: 10273 and a light chain (LC) variable domain comprising SEQ ID NO: 10275. In some cases, the anti-TL1A antibody comprises a heavy chain (HC) variable domain comprising SEQ ID NO: 10273 and a light chain (LC) variable domain comprising SEQ ID NO: 10276. In some cases, the anti-TL1A antibody comprises a heavy chain (HC) variable domain comprising SEQ ID NO: 10273 and a light chain (LC) variable domain comprising SEQ ID NO: 10277. In some cases, the anti-TL1A antibody comprises a heavy chain (HC) variable domain comprising SEQ ID NO: 10273 and a light chain (LC) variable domain comprising SEQ ID NO: 10278. In some cases, the anti-TL1A antibody comprises a heavy chain (HC) variable domain comprising SEQ ID NO: 10273 and a light chain (LC) variable domain comprising SEQ ID NO: 10279. In some cases, the anti-TL1A antibody comprises a heavy chain (HC) variable domain comprising SEQ ID NO: 10273 and a light chain (LC) variable domain comprising SEQ ID NO: 10280. In some cases, the anti-TL1A antibody comprises a heavy chain (HC) variable domain comprising SEQ ID NO: 10273 and a light chain (LC) variable domain comprising SEQ ID NO: 10281. In some cases, the anti-TL1A antibody comprises a heavy chain (HC) variable domain comprising SEQ ID NO: 10273 and a light chain (LC) variable domain comprising SEQ ID NO: 10282.

[0759] In some embodiments, the anti-TL1A antibody comprises a HCDR1 comprising SEQ ID NO: 10263, a HCDR2 comprising SEQ ID NO: 10264, a HCDR3 comprising SEQ ID NO: 10266, a LCDR1 comprising SEQ ID NO: 10268, a LCDR2 comprising SEQ ID NO: 10269, and a LCDR3 comprising SEQ ID NO: 10270. In some cases, the anti-TL1A antibody comprises a heavy chain (HC) variable domain comprising SEQ ID NO: 10274 and a light chain (LC) variable domain comprising SEQ ID NO: 10279. In some cases, the anti-TL1A antibody comprises a heavy chain (HC) variable domain comprising SEQ ID NO: 10274 and a light chain (LC) variable domain comprising SEQ ID NO: 10280. In some cases, the anti-TL1A antibody comprises a heavy chain (HC) variable domain comprising SEQ ID NO: 10274 and a light chain (LC) variable domain comprising SEQ ID NO: 10281. In some cases, the anti-TL1A antibody comprises a heavy chain (HC) variable domain comprising SEQ ID NO: 10274 and a light chain (LC) variable domain comprising SEQ ID NO: 10282. In some cases, the anti-TL1A antibody comprises a heavy chain (HC) variable domain comprising SEQ ID NO: 10274 and a light chain (LC) variable domain comprising SEQ ID NO: 10275. In some cases, the anti-TL1A antibody comprises a heavy chain (HC) variable domain comprising SEQ ID NO: 10274 and a light chain (LC) variable domain comprising SEQ ID NO: 10276. In some cases, the anti-TL1A antibody comprises a heavy chain (HC) variable domain comprising SEQ ID NO: 10274 and a light chain (LC) variable domain comprising SEQ ID NO: 10277. In some cases, the anti-TL1A antibody comprises a heavy chain (HC) variable domain comprising SEQ ID NO: 10274 and a light chain (LC) variable domain comprising SEQ ID NO: 10278.

[0760] In some embodiments, the anti-TL1A antibody comprises a HCDR1 comprising SEQ ID NO: 10283, a HCDR2 comprising SEQ ID NO: 10284, a HCDR3 comprising SEQ ID NO: 10285, a LCDR1 comprising SEQ ID NO: 10286, a LCDR2 comprising SEQ ID NO: 10287, and a LCDR3 comprising SEQ ID NO: 10288. In some cases, the anti-TL1A antibody comprises a heavy chain (HC) variable domain comprising SEQ ID NO: 10289 and a light chain (LC) variable domain comprising SEQ ID NO: 10294. In some cases, the anti-TL1A antibody comprises a heavy chain (HC) variable domain comprising SEQ ID NO: 10289 and a light chain (LC) variable domain comprising SEQ ID NO: 10295. In some cases, the anti-TL1A antibody comprises a heavy chain (HC) variable domain comprising SEQ ID NO: 10289 and a light chain (LC) variable domain comprising SEQ ID NO: 10296. In some cases, the anti-TL1A antibody comprises a heavy chain (HC) variable domain comprising SEQ ID NO: 10289 and a light chain (LC) variable domain comprising SEQ ID NO: 10297. In some cases, the anti-TL1A antibody comprises a heavy chain (HC) variable domain comprising SEQ ID NO: 10290 and a light chain (LC) variable domain comprising SEQ ID NO: 10294. In some cases, the anti-TL1A antibody comprises a heavy chain (HC) variable domain comprising SEQ ID NO: 10290 and a light chain (LC) variable domain comprising SEQ ID NO: 10295. In some cases, the anti-TL1A antibody comprises a heavy chain (HC) variable domain comprising SEQ ID NO: 10290 and a light chain (LC) variable domain comprising SEQ ID NO: 10296. In some cases, the anti-TL1A antibody comprises a heavy chain (HC) variable domain comprising SEQ ID NO: 10290 and a light chain (LC) variable domain comprising SEQ ID NO: 10297. In some cases, the anti-TL1A antibody comprises a heavy chain (HC) variable domain comprising SEQ ID NO: 10291 and a light chain (LC) variable domain comprising SEQ ID NO: 10294. In some cases, the anti-TL1A antibody comprises a heavy chain (HC) variable domain comprising SEQ ID NO: 10291 and a light chain (LC) variable domain comprising SEQ ID NO: 10295. In some cases, the anti-TL1A antibody comprises a heavy chain (HC) variable domain comprising SEQ ID NO: 10291 and a light chain (LC) variable domain comprising SEQ ID NO: 10296. In some cases, the anti-TL1A antibody comprises a heavy chain (HC) variable domain comprising SEQ ID NO: 10291 and a light chain (LC) variable domain comprising SEQ ID NO: 10297. In some cases, the anti-TL1A antibody comprises a heavy chain (HC) variable domain comprising SEQ ID NO: 10292 and a light chain (LC) variable domain comprising SEQ ID NO: 10294. In some cases, the anti-TL1A antibody comprises a heavy chain (HC) variable domain comprising SEQ ID NO: 10292 and a light chain (LC) variable domain comprising SEQ ID NO: 10295. In some cases, the anti-TL1A antibody comprises a heavy chain (HC) variable domain comprising SEQ ID NO: 10292 and a light chain (LC) variable domain comprising SEQ ID NO: 10296. In some cases, the anti-TL1A antibody comprises a heavy chain (HC) variable domain comprising SEQ ID NO: 10292 and a light chain (LC) variable domain comprising SEQ ID NO: 10297. In some cases, the anti-TL1A antibody comprises a heavy chain (HC) variable domain comprising SEQ ID NO: 10293 and a light chain (LC) variable domain comprising SEQ ID NO: 10294. In some cases, the anti-TL1A antibody comprises a heavy chain (HC) variable domain comprising SEQ ID NO: 10293 and a light chain (LC) variable domain comprising SEQ ID NO: 10295. In some cases, the anti-TL1A antibody comprises a heavy chain (HC) variable domain comprising SEQ ID NO: 10293 and a light chain (LC) variable domain comprising SEQ ID NO: 10296. In some cases, the anti-TL1A antibody comprises a heavy chain (HC) variable domain comprising SEQ ID NO: 10293 and a light chain (LC) variable domain comprising SEQ ID NO: 10297.

[0761] In some embodiments, the anti-TL1A antibody comprises a HCDR1 comprising SEQ ID NO: 10298, a HCDR2 comprising SEQ ID NO: 10299, a HCDR3 comprising SEQ ID NO: 10300, a LCDR1 comprising SEQ ID NO: 10301, a LCDR2 comprising SEQ ID NO: 10302, and a LCDR3 comprising SEQ ID NO: 10303. In some cases, the anti-TL1A antibody comprises a heavy chain (HC) variable domain comprising SEQ ID NO: 10304 and a light chain (LC) variable domain comprising SEQ ID NO: 10305. In some cases, the anti-TL1A antibody comprises a heavy chain (HC) variable domain comprising SEQ ID NO: 10306 and a light chain (LC) variable domain comprising SEQ ID NO: 10307. In some cases, the anti-TL1A antibody comprises a heavy chain (HC) variable domain comprising SEQ ID NO: 10308 and a light chain (LC) variable domain comprising SEQ ID NO: 10309. In some cases, the anti-TL1A antibody comprises a heavy chain (HC) variable domain comprising SEQ ID NO: 10310 and a light chain (LC) variable domain comprising SEQ ID NO: 10311. In some cases, the anti-TL1A antibody comprises a heavy chain (HC) variable domain comprising SEQ ID NO: 10312 and a light chain (LC) variable domain comprising SEQ ID NO: 10313. In some cases, the anti-TL1A antibody comprises a heavy chain (HC) variable domain comprising SEQ ID NO: 10314 and a light chain (LC) variable domain comprising SEQ ID NO: 10315. In some cases, the anti-TL1A antibody comprises a heavy chain (HC) variable domain comprising SEQ ID NO: 10316 and a light chain (LC) variable domain comprising SEQ ID NO: 10317. In some cases, the anti-TL1A antibody comprises a heavy chain (HC) variable domain comprising SEQ ID NO: 10318 and a light chain (LC) variable domain comprising SEQ ID NO: 10319. In some cases, the anti-TL1A antibody comprises a heavy chain (HC) variable domain comprising SEQ ID NO: 10320 and a light chain (LC) variable domain comprising SEQ ID NO: 10321. In some cases, the anti-TL1A antibody comprises a heavy chain (HC) variable domain comprising SEQ ID NO: 10322 and a light chain (LC) variable domain comprising SEQ ID NO: 10323. In some cases, the anti-TL1A antibody comprises a heavy chain (HC) variable domain comprising SEQ ID NO: 10324 and a light chain (LC) variable domain comprising SEQ ID NO: 10325. In some cases, the anti-TL1A antibody comprises a heavy chain (HC) variable domain comprising SEQ ID NO: 10326 and a light chain (LC) variable domain comprising SEQ ID NO: 10327.

[0762] In some embodiments, the anti-TL1A antibody comprises a HCDR1 comprising SEQ ID NO: 10328, a HCDR2 comprising SEQ ID NO: 10329, a HCDR3 comprising SEQ ID NO: 10330, a LCDR1 comprising SEQ ID NO: 10331, a LCDR2 comprising SEQ ID NO: 10332, and a LCDR3 comprising SEQ ID NO: 10333. In some cases, the anti-TL1A antibody comprises a heavy chain (HC) variable domain comprising SEQ ID NO: 10334 and a light chain (LC) variable domain comprising SEQ ID NO: 10335.

[0763] In some embodiments, the anti-TL1A antibody comprises a HCDR1 comprising SEQ ID NO: 10336, a HCDR2 comprising SEQ ID NO: 10337, a HCDR3 comprising SEQ ID NO: 10338, a LCDR1 comprising SEQ ID NO: 10339, a LCDR2 comprising SEQ ID NO: 10340, and a LCDR3 comprising SEQ ID NO: 10341. In some cases, the anti-TL1A antibody comprises a heavy chain (HC) variable domain comprising SEQ ID NO: 10342 and a light chain (LC) variable domain comprising SEQ ID NO: 10343.

[0764] In some embodiments, the anti-TL1A antibody comprises a HCDR1 comprising SEQ ID NO: 10346, a HCDR2 comprising SEQ ID NO: 10347, a HCDR3 comprising SEQ ID NO: 10348, a LCDR1 comprising SEQ ID NO: 10349, a LCDR2 comprising SEQ ID NO: 10350, and a LCDR3 comprising SEQ ID NO: 10351. In some cases, the anti-TL1A antibody comprises a heavy chain (HC) variable domain comprising SEQ ID NO: 10344 and a light chain (LC) variable domain comprising SEQ ID NO: 10345. In some cases, the anti-TL1A antibody comprises a heavy chain (HC) variable domain comprising SEQ ID NO: 10352 and a light chain (LC) variable domain comprising SEQ ID NO: 10353. In some cases, the anti-TL1A antibody comprises a heavy chain (HC) variable domain comprising SEQ ID NO: 10354 and a light chain (LC) variable domain comprising SEQ ID NO: 10355. In some cases, the anti-TL1A antibody comprises a heavy chain (HC) variable domain comprising SEQ ID NO: 10356 and a light chain (LC) variable domain comprising SEQ ID NO: 10357.

[0765] In some embodiments, the anti-TL1A antibody comprises a HCDR1 comprising SEQ ID NO: 10376, a HCDR2 comprising SEQ ID NO: 10377, a HCDR3 comprising SEQ ID NO: 10378, a LCDR1 comprising SEQ ID NO: 10379, a LCDR2 comprising SEQ ID NO: 10380, and a LCDR3 comprising SEQ ID NO: 10381. In some cases, the anti-TL1A antibody comprises a heavy chain (HC) variable domain comprising SEQ ID NO: 10382 and a light chain (LC) variable domain comprising SEQ ID NO: 10383.

[0766] In some embodiments, the anti-TL1A antibody comprises a HCDR1 comprising SEQ ID NO: 10384, a HCDR2 comprising SEQ ID NO: 10385, a HCDR3 comprising SEQ ID NO: 10386, a LCDR1 comprising SEQ ID NO: 10387, a LCDR2 comprising SEQ ID NO: 10388, and a LCDR3 comprising SEQ ID NO: 10399. In some cases, the anti-TL1A antibody comprises a heavy chain (HC) variable domain comprising SEQ ID NO: 10390 and a light chain (LC) variable domain comprising SEQ ID NO: 10391.

[0767] In some embodiments, the anti-TL1A antibody comprises one or more of A101-A177 of Table 5. In some embodiments, the anti-TL1A antibody is A100. In some embodiments, the anti-TL1A antibody is A101. In some embodiments, the anti-TL1A antibody is A102. In some embodiments, the anti-TL1A antibody is A103. In some embodiments, the anti-TL1A antibody is A104. In some embodiments, the anti-TL1A antibody is A105. In some embodiments, the anti-TL1A antibody is A106. In some embodiments, the anti-TL1A antibody is A107. In some embodiments, the anti-TL1A antibody is A108. In some embodiments, the anti-TL1A antibody is A109. In some embodiments, the anti-TL1A antibody is A110. In some embodiments, the anti-TL1A antibody is A111. In some embodiments, the anti-TL1A antibody is A112. In some embodiments, the anti-TL1A antibody is A113. In some embodiments, the anti-TL1A antibody is A114. In some embodiments, the anti-TL1A antibody is A115. In some embodiments, the anti-TL1A antibody is A116. In some embodiments, the anti-TL1A antibody is A117. In some embodiments, the anti-TL1A antibody is A118. In some embodiments, the anti-TL1A antibody is A119. In some embodiments, the anti-TL1A antibody is A120. In some embodiments, the anti-TL1A antibody is A121. In some embodiments, the anti-TL1A antibody is A122. In some embodiments, the anti-TL1A antibody is A123. In some embodiments, the anti-TL1A antibody is A124. In some embodiments, the anti-TL1A antibody is A125. In some embodiments, the anti-TL1A antibody is A126. In some embodiments, the anti-TL1A antibody is A127. In some embodiments, the anti-TL1A antibody is A128. In some embodiments, the anti-TL1A antibody is A129. In some embodiments, the anti-TL1A antibody is A130. In some embodiments, the anti-TL1A antibody is A131. In some embodiments, the anti-TL1A antibody is A132. In some embodiments, the anti-TL1A antibody is A133. In some embodiments, the anti-TL1A antibody is A134. In some embodiments, the anti-TL1A antibody is A135. In some embodiments, the anti-TL1A antibody is A136. In some embodiments, the anti-TL1A antibody is A137. In some embodiments, the anti-TL1A antibody is A138. In some embodiments, the anti-TL1A antibody is A139. In some embodiments, the anti-TL1A antibody is A140. In some embodiments, the anti-TL1A antibody is A141. In some embodiments, the anti-TL1A antibody is A142. In some embodiments, the anti-TL1A antibody is A143. In some embodiments, the anti-TL1A antibody is A144. In some embodiments, the anti-TL1A antibody is A145. In some embodiments, the anti-TL1A antibody is A146. In some embodiments, the anti-TL1A antibody is A147. In some embodiments, the anti-TL1A antibody is A148. In some embodiments, the anti-TL1A antibody is A149. In some embodiments, the anti-TL1A antibody is A150. In some embodiments, the anti-TL1A antibody is A151. In some embodiments, the anti-TL1A antibody is A152. In some embodiments, the anti-TL1A antibody is A153. In some embodiments, the anti-TL1A antibody is A154. In some embodiments, the anti-TL1A antibody is A155. In some embodiments, the anti-TL1A antibody is A156. In some embodiments, the anti-TL1A antibody is A157. In some embodiments, the anti-TL1A antibody is A158. In some embodiments, the anti-TL1A antibody is A159. In some embodiments, the anti-TL1A antibody is A160. In some embodiments, the anti-TL1A antibody is A161. In some embodiments, the anti-TL1A antibody is A162. In some embodiments, the anti-TL1A antibody is A163. In some embodiments, the anti-TL1A antibody is A164. In some embodiments, the anti-TL1A antibody is A165. In some embodiments, the anti-TL1A antibody is A166. In some embodiments, the anti-TL1A antibody is A167. In some embodiments, the anti-TL1A antibody is A168. In some embodiments, the anti-TL1A antibody is A169. In some embodiments, the anti-TL1A antibody is A170. In some embodiments, the anti-TL1A antibody is A171. In some embodiments, the anti-TL1A antibody is A172. In some embodiments, the anti-TL1A antibody is A173. In some embodiments, the anti-TL1A antibody is A174. In some embodiments, the anti-TL1A antibody is A175. In some embodiments, the anti-TL1A antibody is A176. In some embodiments, the anti-TL1A antibody is A177.

[0768] In some embodiments, the anti-DR3 is A178. In some embodiments, the anti-DR3 is A179. In some embodiments, the anti-DR3 is A180. In some embodiments, the anti-DR3 is A181. In some embodiments, the anti-DR3 is A182. In some embodiments, the anti-DR3 is A183. In some embodiments, the anti-DR3 is A184. In some embodiments, the anti-DR3 is A185. In some embodiments, the anti-DR3 is A186. In some embodiments, the anti-DR3 is A187. In some embodiments, the anti-DR3 is A188. In some embodiments, the anti-DR3 is A189. In some embodiments, the anti-DR3 is A190. In some embodiments, the anti-DR3 is A191. In some embodiments, the anti-DR3 is A192. In some embodiments, the anti-DR3 is A193. In some embodiments, the anti-DR3 is A194. In some embodiments, the anti-DR3 is A195. In some embodiments, the anti-DR3 is A196. In some embodiments, the anti-DR3 is A197. In some embodiments, the anti-DR3 is A198. In some embodiments, the anti-DR3 is A199. In some embodiments, the anti-DR3 is A200. In some embodiments, the anti-DR3 is A201. In some embodiments, the anti-DR3 is A202. In some embodiments, the anti-DR3 is A203. In some embodiments, the anti-DR3 is A204. In some embodiments, the anti-DR3 is A205. In some embodiments, the anti-DR3 is A206. In some embodiments, the anti-DR3 is A207. In some embodiments, the anti-DR3 is A208. In some embodiments, the anti-DR3 is A209. In some embodiments, the anti-DR3 is A210. In some embodiments, the anti-DR3 is A211. In some embodiments, the anti-DR3 is A212. In some embodiments, the anti-DR3 is A213. In some embodiments, the anti-DR3 is A214. In some embodiments, the anti-DR3 is A215. In some embodiments, the anti-DR3 is A216. In some embodiments, the anti-DR3 is A217. In some embodiments, the anti-DR3 is A218. In some embodiments, the anti-DR3 is A219. In some embodiments, the anti-DR3 is A220. In some embodiments, the anti-DR3 is A221. In some embodiments, the anti-DR3 is A222. In some embodiments, the anti-DR3 is A223. In some embodiments, the anti-DR3 is A224. In some embodiments, the anti-DR3 is A225. In some embodiments, the anti-DR3 is A226. In some embodiments, the anti-DR3 is A227. In some embodiments, the anti-DR3 is A228. In some embodiments, the anti-DR3 is A229. In some embodiments, the anti-DR3 is A230. In some embodiments, the anti-DR3 is A231. In some embodiments, the anti-DR3 is A232. In some embodiments, the anti-DR3 is A233. In some embodiments, the anti-DR3 is A234. In some embodiments, the anti-DR3 is A235. In some embodiments, the anti-DR3 is A236. In some embodiments, the anti-DR3 is A237. In some embodiments, the anti-DR3 is A238. In some embodiments, the anti-DR3 is A239. In some embodiments, the anti-DR3 is A240. In some embodiments, the anti-DR3 is A241. In some embodiments, the anti-DR3 is A242.

TABLE 5
Non-Limiting Examples of anti-TL1A and anti-DR3 Antibodies

| Antibody | HC Variable Domain | LC Variable Domain |
|---|---|---|
| Name | (SEQ ID NO) | (SEQ ID NO) |
| A100 | 10215 | 10216 |
| A101 | 10223 | 10224 |
| A102 | 10231 | 10232 |
| A103 | 10242 | 10243 |
| A104 | 10252 | 10253 |
| A105 | 10260 | 10261 |
| A106 | 10271 | 10275 |
| A107 | 10271 | 10276 |
| A108 | 10271 | 10277 |
| A109 | 10271 | 10278 |
| A110 | 10271 | 10279 |
| A111 | 10271 | 10280 |
| A112 | 10271 | 10281 |
| A113 | 10271 | 10282 |
| A114 | 10272 | 10275 |
| A115 | 10272 | 10276 |
| A116 | 10272 | 10277 |
| A117 | 10272 | 10278 |
| A118 | 10272 | 10279 |
| A119 | 10272 | 10280 |
| A120 | 10272 | 10281 |
| A121 | 10272 | 10282 |
| A122 | 10273 | 10275 |
| A123 | 10273 | 10276 |
| A124 | 10273 | 10277 |

### CD30L Modulators

[0769] In some embodiments, the therapeutic agent is a modulator of CD30 ligand (CD30L). In some embodiments, the modulator of CD30L is an agonist or an antagonist of CD30L In some instances, the antagonist of CD30L is an inhibitor of CD30L. In some embodiments, an inhibitor of CD30L specifically binds directly or indirectly to CD30L, CD30, or a molecule that interferes directly or indirectly with binding between CD30L and CD30. In some embodiments, as used herein, an inhibitor of CD30L comprises an agent that modulates at least one functional activity of CD30L, such as binding to CD30. Non-limiting examples of inhibitors of CD30L include agents that specifically bind to CD30L, including a polypeptide such as an anti-CD30L antibody or antigen binding fragment thereof, and a nucleic acid, e.g., an antisense construct, siRNA, and ribozyme. An antisense construct includes an expression plasmid that when transcribed in the cell produces RNA complementary to a portion of mRNA encoding CD30L, and an oligonucleotide that inhibits protein expression by hybridizing with the CD30L mRNA In some embodiments the inhibitor of CD30L comprises a non-polypeptide or non-nucleic acid portion as an active agent that binds to and inhibits CD30L activity.

[0770] In some embodiments, an inhibitor of CD30L is a polypeptide that binds to CD30L and/or CD30. In some cases, the polypeptide is a CD30 polypeptide or a portion thereof, wherein the portion retains the ability to bind to CD30L. A portion of a CD30 polypeptide includes at least about 10, 15, 20, 25, 30, 35, 40, 45, or 50 amino acids that have at least about 85%, 90%, or 95% identity to human CD30 having SEQ ID NOS: 448, or SEQ ID NOS: 449, or a sequence of any CD30 protein-coding isoform (for e.g., P28908). For example, an inhibitor of CD30L comprises a CD30 polypeptide that comprises all or part of the extracellular region of human CD30. In some embodiments, the CD30 polypeptide comprises amino acids 19-390 of SEQ ID NOS: 448 or 449, or a binding fragment thereof, having at least about 85%, 90%, or 95% sequence identity to CD30. In some embodiments, the CD30 polypeptide is a homologue of mammalian CD30, e.g., the CD30 polypeptide inhibitor of CD30L is a viral CD30 polypeptide or fragment thereof. As a non-limiting example, the viral CD30 polypeptide comprises viral CD30 from a poxvirus, such as ectromelia virus or cowpox virus.

[0771] In a non-limiting example, the inhibitor is an anti-CD30L antibody or an anti-CD30 antibody. As used herein, an antibody includes an antigen-binding fragment of a full length antibody, e.g., a Fab or scFv. In some embodiments, the antibody binds to the extracellular domain of CD30L. In some embodiments, an anti-CD30L antibody comprises a heavy chain comprising three complementarity-determining regions: HCDR1, HCDR2, and HCDR3; and a light chain comprising three complementarity-determining regions: LCDR1, LCDR2, and LCDR3. In some embodiments, the anti-CD30L antibody comprises a HCDR1 comprising SEQ ID NOS: 11100, a HCDR2 comprising SEQ ID NOS: 11101, a HCDR3 comprising SEQ ID NOS: 11102, a LCDR1 comprising SEQ ID NOS: 11103, a LCDR2 comprising SEQ ID NOS: 11104, and a LCDR3 comprising SEQ ID NOS: 11105.

[0772] In some embodiments, the anti-CD30L antibody comprises a HCDR1 comprising SEQ ID NOS: 11106, a HCDR2 comprising SEQ ID NOS: 11107, a HCDR3 comprising SEQ ID NOS: 11108, a LCDR1 comprising SEQ ID NOS: 11109, a LCDR2 comprising SEQ ID NOS: 11110, and a LCDR3 comprising SEQ ID NOS: 11111.

[0773] In some embodiments, the anti-CD30L antibody comprises a HCDR1 comprising SEQ ID NOS: 11112, a HCDR2 comprising SEQ ID NOS: 11113, a HCDR3 comprising SEQ ID NOS: 11114, a LCDR1 comprising SEQ ID NOS: 11115, a LCDR2 comprising SEQ ID NOS: 11116, and a LCDR3 comprising SEQ ID NOS: 11117.

[0774] In some embodiments, the anti-CD30L antibody comprises a HCDR1 comprising SEQ ID NOS: 11118, a HCDR2 comprising SEQ ID NOS: 11119, a HCDR3 comprising SEQ ID NOS: 11120, a LCDR1 comprising SEQ ID NOS: 11121, a LCDR2 comprising SEQ ID NOS: 11122, and a LCDR3 comprising SEQ ID NOS: 11123.

[0775] In some embodiments, the anti-CD30L antibody comprises a HCDR1 comprising SEQ ID NOS: 11124, a HCDR2 comprising SEQ ID NOS: 11125, a HCDR3 comprising SEQ ID NOS: 11126, a LCDR1 comprising SEQ ID NOS: 11127, a LCDR2 comprising SEQ ID NOS: 11128, and a LCDR3 comprising SEQ ID NOS: 11129.

[0776] In some embodiments, the anti-CD30L antibody comprises a HCDR1 comprising SEQ ID NOS: 11130, a HCDR2 comprising SEQ ID NOS: 11131, a HCDR3 comprising SEQ ID NOS: 11132, a LCDR1 comprising SEQ ID NOS: 11133, a LCDR2 comprising SEQ ID NOS: 11134, and a LCDR3 comprising SEQ ID NOS: 11135.

[0777] In some cases, the anti-CD30L antibody comprises a heavy chain (HC) variable domain comprising SEQ ID NOS: 11136 and a light chain (LC) variable domain comprising SEQ ID NOS: 11137. In some cases, the anti-CD30L antibody comprises a heavy chain (HC) variable domain comprising SEQ ID NOS: 11138 and a light chain (LC) variable domain comprising SEQ ID NOS: 11139. In some cases, the anti-CD30L antibody comprises a heavy chain (HC) variable domain comprising SEQ ID NOS: 11140 and a light chain (LC) variable domain comprising SEQ ID NOS: 11141. In some cases, the anti-CD30L antibody comprises a heavy chain (HC) variable domain comprising SEQ ID NOS: 11142 and a light chain (LC) variable domain comprising SEQ ID NOS: 11143. In some cases, the anti-CD30L antibody comprises a heavy chain (HC) variable domain comprising SEQ ID NOS: 11144 and a light chain (LC) variable domain comprising SEQ ID NOS: 11145. In some cases, the anti-CD30L antibody comprises a heavy chain (HC) variable domain comprising SEQ ID NOS: 11146 and a light chain (LC) variable domain comprising SEQ ID NOS: 11154. In some cases, the anti-CD30L antibody comprises a heavy chain (HC) variable domain comprising SEQ ID NOS: 11147 and a light chain (LC) variable domain comprising SEQ ID NOS: 11154. In some cases, the anti-CD30L antibody comprises a heavy chain (HC) variable domain comprising SEQ ID NOS: 11148 and a light chain (LC) variable domain comprising SEQ ID NOS: 11154. In some cases, the anti-CD30L antibody comprises a heavy chain (HC) variable domain comprising SEQ ID NOS: 11149 and a light chain (LC) variable domain comprising SEQ ID NOS: 11154. In some cases, the anti-CD30L antibody comprises a heavy chain (HC) variable domain comprising SEQ ID NOS: 11150 and a light chain (LC) variable domain comprising SEQ ID NOS: 11154. In some cases, the anti-CD30L antibody comprises a heavy chain (HC) variable domain comprising SEQ ID NOS: 11151 and a light chain (LC) variable domain comprising SEQ ID NOS: 11154. In some cases, the anti-CD30L antibody comprises a heavy chain (HC) variable domain comprising SEQ ID NOS: 11152 and a light chain (LC) variable domain comprising SEQ ID NOS: 11154. In some cases, the anti-CD30L antibody comprises a heavy chain (HC) variable domain comprising SEQ ID NOS: 11153 and a light chain (LC) variable domain comprising SEQ ID NOS: 11154.

[0778] In some embodiments, the anti-CD30 antibody comprises a heavy chain variable region comprising SEQ ID NOS: 446 and a light chain variable region comprising SEQ ID NOS: 447. Non-limiting examples of anti-CD30 antibodies include MDX-60, Ber-H2, SGN-30 (cAC10), Ki-4.dgA, HRS-3/A9, AFM13, and H22xKi-4.

[0779] In some embodiments, the anti-CD30 antibody comprises an antibody drug conjugate. As a non-limiting example, the antibody drug conjugate is brentuximab, an anti-CD30 antibody conjugated to monomethyl auristatin E.

### Dosages and Routes of Administration

[0780] In general, methods disclosed herein comprise administering a therapeutic agent by oral administration. However, in some instances, methods comprise administering a therapeutic agent by intraperitoneal injection. In some instances, methods comprise administering a therapeutic agent in the form of an anal suppository. In some instances, methods comprise administering a therapeutic agent by intravenous (“i.v.”) administration. It is conceivable that one may also administer therapeutic agents disclosed herein by other routes, such as subcutaneous injection, intramuscular injection, intradermal injection, trasndermal injection percutaneous administration, intranasal administration, intralymphatic injection, rectal administration intragastric administration, or any other suitable parenteral administration. In some embodiments, routes for local delivery closer to site of injury or inflammation are preferred over systemic routes. Routes, dosage, time points, and duration of administrating therapeutics may be adjusted. In some embodiments, administration of therapeutics is prior to, or after, onset of either, or both, acute and chronic symptoms of the disease or condition.

[0781] An effective dose and dosage of therapeutics to prevent or treat the disease or condition disclosed herein is defined by an observed beneficial response related to the disease or condition, or symptom of the disease or condition. Beneficial response comprises preventing, alleviating, arresting, or curing the disease or condition, or symptom of the disease or condition (e.g., reduced instances of diarrhea, rectal bleeding, weight loss, and size or number of intestinal lesions or strictures, reduced fibrosis or fibrogenesis, reduced fibrostenosis, reduced inflammation). In some embodiments, the beneficial response may be measured by detecting a measurable improvement in the presence, level, or activity, of biomarkers, transcriptomic risk profile, or intestinal microbiome in the subject. An “improvement,” as used herein refers to shift in the presence, level, or activity towards a presence, level, or activity, observed in normal individuals (e.g. individuals who do not suffer from the disease or condition). In instances wherein the therapeutic agent is not therapeutically effective or is not providing a sufficient alleviation of the disease or condition, or symptom of the disease or condition, then the dosage amount and/or route of administration may be changed, or an additional agent may be administered to the subject, along with the therapeutic agent. In some embodiments, as a patient is started on a regimen of a therapeutic agent, the patient is also weaned off (e.g., step-wise decrease in dose) a second treatment regimen.

[0782] Suitable dose and dosage administrated to a subject is determined by factors including, but no limited to, the particular therapeutic agent, disease condition and its severity, the identity (e.g., weight, sex, age) of the subject in need of treatment, and can be determined according to the particular circumstances surrounding the case, including, e.g., the specific agent being administered, the route of administration, the condition being treated, and the subject or host being treated. In general, however, doses employed for adult human treatment are typically in the range of 0.01 mg-5000 mg per day. In one aspect, doses employed for adult human treatment are from about 1 mg to about 1000 mg per day. In one embodiment, the desired dose is conveniently presented in a single dose or in divided doses administered simultaneously (or over a short period of time) or at appropriate intervals, for example as two, three, four or more sub-doses per day. Non-limiting examples of effective dosages of for oral delivery of a therapeutic agent include between about 0.1 mg/kg and about 100 mg/kg of body weight per day, and preferably between about 0.5 mg/kg and about 50 mg/kg of body weight per day. In other instances, the oral delivery dosage of effective amount is about 1 mg/kg and about 10 mg/kg of body weight per day of active material. Non-limiting examples of effective dosages for intravenous administration of the therapeutic agent include at a rate between about 0.01 to 100 pmol/kg body weight/min. In some embodiments, the daily dosage or the amount of active in the dosage form are lower or higher than the ranges indicated herein, based on a number of variables in regard to an individual treatment regime. In various embodiments, the daily and unit dosages are altered depending on a number of variables including, but not limited to, the activity of the therapeutic agent used, the disease or condition to be treated, the mode of administration, the requirements of the individual subject, the severity of the disease or condition being treated, and the judgment of the practitioner.

[0783] In some embodiments, the administration of the therapeutic agent is hourly, once every 2 hours, 3 hours, 4 hours, 5 hours, 6 hours, 7 hours, 8 hours, 9 hours, 10 hours, 11 hours, 12 hours, 13 hours, 14 hours, 15 hours, 16 hours, 17 hours, 18 hours, 19 hours, 20 hours, 21 hours 22 hours, 23 hours, 1 day, 2 days, 3 days, 4 days, 5 days, 6 days, 7 days, 8 days, 9 days, 10 days, 11 days, 12 days, 13 days, 14 days, 15 days, 1 month, 2 months, 3 months, 4 months, 5 months, 6 months, 7 months, 8 months, 9 months, 10 months, 11 months, 1 year, 2 years, 3 years, 4 years, or 5 years, or 10 years. The effective dosage ranges may be adjusted based on subject's response to the treatment. Some routes of administration will require higher concentrations of effective amount of therapeutics than other routes.

[0784] In certain embodiments wherein the patient's condition does not improve, upon the doctor's discretion the administration of therapeutic agent is administered chronically, that is, for an extended period of time, including throughout the duration of the patient's life in order to ameliorate or otherwise control or limit the symptoms of the patient's disease or condition. In certain embodiments wherein a patient's status does improve, the dose of therapeutic agent being administered may be temporarily reduced or temporarily suspended for a certain length of time (i.e., a “drug holiday”). In specific embodiments, the length of the drug holiday is between 2 days and 1 year, including by way of example only, 2 days, 3 days, 4 days, 5 days, 6 days, 7 days, 10 days, 12 days, 15 days, 20 days, 28 days, or more than 28 days. The dose reduction during a drug holiday is, by way of example only, by 10%-100%, including by way of example only 10%, 15%, 20%, 25%, 30%, 35%, 40%, 45%, 50%, 55%, 60%, 65%, 70%, 75%, 80%, 85%, 90%, 95%, and 100%. In certain embodiments, the dose of drug being administered may be temporarily reduced or temporarily suspended for a certain length of time (i.e., a “drug diversion”). In specific embodiments, the length of the drug diversion is between 2 days and 1 year, including by way of example only, 2 days, 3 days, 4 days, 5 days, 6 days, 7 days, 10 days, 12 days, 15 days, 20 days, 28 days, or more than 28 days. The dose reduction during a drug diversion is, by way of example only, by 10%-100%, including by way of example only 10%, 15%, 20%, 25%, 30%, 35%, 40%, 45%, 50%, 55%, 60%, 65%, 70%, 75%, 80%, 85%, 90%, 95%, and 100%. After a suitable length of time, the normal dosing schedule is optionally reinstated.

[0785] In some embodiments, once improvement of the patient's conditions has occurred, a maintenance dose is administered if necessary. Subsequently, in specific embodiments, the dosage or the frequency of administration, or both, is reduced, as a function of the symptoms, to a level at which the improved disease, disorder or condition is retained. In certain embodiments, however, the patient requires intermittent treatment on a long-term basis upon any recurrence of symptoms.

[0786] Toxicity and therapeutic efficacy of such therapeutic regimens are determined by standard pharmaceutical procedures in cell cultures or experimental animals, including, but not limited to, the determination of the LD50 and the ED50. The dose ratio between the toxic and therapeutic effects is the therapeutic index and it is expressed as the ratio between LD50 and ED50. In certain embodiments, the data obtained from cell culture assays and animal studies are used in formulating the therapeutically effective daily dosage range and/or the therapeutically effective unit dosage amount for use in mammals, including humans. In some embodiments, the daily dosage amount of the therapeutic agent described herein lies within a range of circulating concentrations that include the ED50 with minimal toxicity. In certain embodiments, the daily dosage range and/or the unit dosage amount varies within this range depending upon the dosage form employed and the route of administration utilized.

[0787] A therapeutic agent may be used alone or in combination with an additional therapeutic agent. In some cases, an “additional therapeutic agent” as used herein is administered alone. The therapeutic agents may be administered together or sequentially. The combination therapies may be administered within the same day, or may be administered one or more days, weeks, months, or years apart. In some cases, a therapeutic agent provided herein is administered if the subject is determined to be non-responsive to a first line of therapy, e.g., such as TNF inhibitor. Such determination may be made by treatment with the first line therapy and monitoring of disease state and/or diagnostic determination that the subject would be non-responsive to the first line therapy.

[0788] In some embodiments, the therapeutic agent or additional therapeutic agent comprises an anti-TNF therapy, e.g., an anti-TNFα therapy. In some embodiments, the additional therapeutic agent or therapeutic agent comprises a second-line treatment to an anti-TNF therapy. In some embodiments, the additional therapeutic agent comprises an immunosuppressant, or a class of drugs that suppress, or reduce, the strength of the immune system. In some embodiments, the immunosuppressant is an antibody. Non-limiting examples of immunosuppressant therapeutic agents include STELARA® (ustekinumab) azathioprine (AZA), 6-mercaptopurine (6-MP), methotrexate, cyclosporin A. (CsA).

[0789] In some embodiments, the additional therapeutic agent or therapeutic agent comprises a selective anti-inflammatoiy drug, or a class of drugs that specifically target pro-inflammatory molecules in the body. In some embodiments, the anti-inflammatory drug comprises an antibody. In some embodiments, the anti-inflammatory drug comprises a small molecule. Non-limiting examples of anti-inflammatory drugs include ENTYVIO (vedolizumab), corticosteroids, aminosalicylates, mesalamine, balsalazide (Colazal) and olsalazine (Dipentum).

[0790] In some embodiments, the additional therapeutic agent or therapeutic agent comprises a stem cell therapy. The stem cell therapy may be embryonic or somatic stem cells. The stem cells may be isolated from a donor (allogeneic) or isolated from the subject (autologous). The stem cells may be expanded adipose-derived stem cells (eASCs), hematopoietic stem cells (HSCs), mesenchymal stem (stromal) cells (MSCs), or induced pluripotent stem cells (iPSCs) derived from the cells of the subject. In some embodiments, the therapeutic agent comprises Cx601/Alofisel® (darvadstrocel).

[0791] In some embodiments, the additional therapeutic agent comprises a small molecule. The small molecule may be used to treat inflammatory diseases or conditions, or fibrostenonic or fibrotic disease. Non-limiting examples of small molecules include Otezla® (apremilast), alicaforsen, or ozanimod (RPC-1063).

[0792] In some instances, the additional therapeutic agent or therapeutic agent comprises administering to the subject an antimycotic agent. In some instances, the antimycotic agent comprises an active agent that inhibits growth of a fungus. In some instances, the antimycotic agent comprises an active agent that kills a fungus. In some embodiments, the antimycotic agent comprises polyene, an azole, an echinocandin, an flucytosine, an allylamine, a tolnaftate, or griseofulvin, or a combination thereof. In other embodiments, the azole comprises triazole, imidazole, clotrimazole, ketoconazole, itraconazole, terconazole, oxiconazole, miconazole, econazole, tioconazole, voriconazole, fluconazole, isavuconazole, itraconazole, pramiconazole, ravuconazole, or posaconazole. In some other embodiments, the polyene comprises amphotericin B, nystatin, or natamycin. In yet other embodiments, the echinocandin comprises caspofungin, anidulafungin, or micafungin. In various other embodiments, the allylamine comprises naftifine or terbinafine.

### Pharmaceutical Composition

[0793] A pharmaceutical composition, as used herein, refers to a mixture of a therapeutic agent, with other chemical components (i.e. pharmaceutically acceptable inactive ingredients), such as carriers, excipients, binders, filling agents, suspending agents, flavoring agents, sweetening agents, disintegrating agents, dispersing agents, surfactants, lubricants, colorants, diluents, solubilizers, moistening agents, plasticizers, stabilizers, penetration enhancers, wetting agents, anti-foaming agents, antioxidants, preservatives, or one or more combination thereof. Optionally, the compositions include two or more therapeutic agent (e.g., one or more therapeutic agents and one or more additional agents) as discussed herein. In practicing the methods of treatment or use provided herein, therapeutically effective amounts of therapeutic agents described herein are administered in a pharmaceutical composition to a mammal having a disease, disorder, or condition to be treated, e.g., an inflammatory disease, fibrostenotic disease, and/or fibrotic disease. In some embodiments, the mammal is a human. A therapeutically effective amount can vary widely depending on the severity of the disease, the age and relative health of the subject, the potency of the therapeutic agent used and other factors. The therapeutic agents can be used singly or in combination with one or more therapeutic agents as components of mixtures.

[0794] The pharmaceutical formulations described herein are administered to a subject by appropriate administration routes, including but not limited to, intravenous, intraarterial, oral, parenteral, buccal, topical, transdermal, rectal, intramuscular, subcutaneous, intraosseous, transmucosal, inhalation, or intraperitoneal administration routes. The pharmaceutical formulations described herein include, but are not limited to, aqueous liquid dispersions, self-emulsifying dispersions, solid solutions, liposomal dispersions, aerosols, solid dosage forms, powders, immediate release formulations, controlled release formulations, fast melt formulations, tablets, capsules, pills, delayed release formulations, extended release formulations, pulsatile release formulations, multiparticulate formulations, and mixed immediate and controlled release formulations.

[0795] Pharmaceutical compositions including a therapeutic agent are manufactured in a conventional manner, such as, by way of example only, by means of conventional mixing dissolving granulating dragee-making levigating emulsifying, encapsulating entrapping or compression processes.

[0796] The pharmaceutical compositions may include at least a therapeutic agent as an active ingredient in free-acid or free-base form, or in a pharmaceutically acceptable salt form. In addition, the methods and pharmaceutical compositions described herein include the use of N-oxides (if appropriate), crystalline forms, amorphous phases, as well as active metabolites of these compounds having the same type of activity. In some embodiments, therapeutic agents exist in unsolvated form or in solvated forms with pharmaceutically acceptable solvents such as water, ethanol, and the like. The solvated forms of the therapeutic agents are also considered to be disclosed herein.

[0797] In some embodiments, a therapeutic agent exists as a tautomer. All tautomers are included within the scope of the agents presented herein. As such, it is to be understood that a therapeutic agent or a salt thereof may exhibit the phenomenon of tautomerism whereby two chemical compounds that are capable of facile interconversion by exchanging a hydrogen atom between two atoms, to either of which it forms a covalent bond Since the tautomeric compounds exist in mobile equilibrium with each other they may be regarded as different isomeric forms of the same compound.

[0798] In some embodiments, a therapeutic agent exists as an enantiomer, diastereomer, or other steroisomeric form. The agents disclosed herein include all enantiomeric, diastereomeric, and epimeric forms as well as mixtures thereof.

[0799] In some embodiments, therapeutic agents described herein may be prepared as prodrugs. A “prodrug” refers to an agent that is converted into the parent drug in vivo. Prodrugs are often useful because, in some situations, they may be easier to administer than the parent drug. They may, for instance, be bioavailable by oral administration whereas the parent is not. The prodrug may also have improved solubility in pharmaceutical compositions over the parent drug. An example, without limitation, of a prodrug would be a therapeutic agent described herein, which is administered as an ester (the “prodrug”) to facilitate transmittal across a cell membrane where water solubility is detrimental to mobility but which then is metabolically hydrolyzed to the carboxylic acid, the active entity, once inside the cell where water-solubility is beneficial. A further example of a prodrug might be a short peptide (polyaminoacid) bonded to an acid group where the peptide is metabolized to reveal the active moiety. In certain embodiments, upon in vivo administration, a prodrug is chemically converted to the biologically, pharmaceutically or therapeutically active form of the therapeutic agent. In certain embodiments, a prodrug is enzymatically metabolized by one or more steps or processes to the biologically, pharmaceutically or therapeutically active form of the therapeutic agent.

[0800] Prodrug forms of the therapeutic agents, wherein the prodrug is metabolized in vivo to produce an agent as set forth herein are included within the scope of the claims. Prodrug forms of the herein described therapeutic agents, wherein the prodrug is metabolized in vivo to produce an agent as set forth herein are included within the scope of the claims. In some cases, some of the therapeutic agents described herein may be a prodrug for another derivative or active compound In some embodiments described herein, hydrazones are metabolized in vivo to produce a therapeutic agent.

[0801] In certain embodiments, compositions provided herein include one or more preservatives to inhibit microbial activity. Suitable preservatives include mercury-containing substances such as merfen and thiomersal; stabilized chlorine dioxide; and quaternary ammonium compounds such as benzalkonium chloride, cetyltrimethylammonium bromide and cetylpyridinium chloride.

[0802] In some embodiments, formulations described herein benefit from antioxidants, metal chelating agents, thiol containing compounds and other general stabilizing agents. Examples of such stabilizing agents, include, but are not limited to: (a) about 0.5% to about 2% w/v glycerol, (b) about 0.1% to about 1% w/v methionine, (c) about 0.1% to about 2% w/v monothioglycerol, (d) about 1 mM to about 10 mM EDTA, (e) about 0.01% to about 2% w/v ascorbic acid, (f) 0.003% to about 0.02% w/v polysorbate 80, (g) 0.001% to about 0.05% w/v. polysorbate 20, (h) arginine, (i) heparin, (j) dextran sulfate, (k) cyclodextrins, (l) pentosan polysulfate and other heparinoids, (m) divalent cations such as magnesium and zinc; or (n) combinations thereof.

[0803] The pharmaceutical compositions described herein are formulated into any suitable dosage form, including but not limited to, aqueous oral dispersions, liquids, gels, syrups, elixirs, slurries, suspensions, solid oral dosage forms, aerosols, controlled release formulations, fast melt formulations, effervescent formulations, lyophilized formulations, tablets, powders, pills, dragees, capsules, delayed release formulations, extended release formulations, pulsatile release formulations, multiparticulate formulations, and mixed immediate release and controlled release formulations. In one aspect, a therapeutic agent as discussed herein, e.g., therapeutic agent is formulated into a pharmaceutical composition suitable for intramuscular, subcutaneous, or intravenous injection. In one aspect, formulations suitable for intramuscular, subcutaneous, or intravenous injection include physiologically acceptable sterile aqueous or non-aqueous solutions, dispersions, suspensions or emulsions, and sterile powders for reconstitution into sterile injectable solutions or dispersions. Examples of suitable aqueous and non-aqueous carriers, diluents, solvents, or vehicles include water, ethanol, polyols (propyleneglycol, polyethylene-glycol, glycerol, cremophor and the like), suitable mixtures thereof, vegetable oils (such as olive oil) and injectable organic esters such as ethyl oleate. Proper fluidity can be maintained, for example, by the use of a coating such as lecithin, by the maintenance of the required particle size in the case of dispersions, and by the use of surfactants. In some embodiments, formulations suitable for subcutaneous injection also contain additives such as preserving, wetting, emulsifying, and dispensing agents. Prevention of the growth of microorganisms can be ensured by various antibacterial and antifungal agents, such as parabens, chlorobutanol, phenol, sorbic acid, and the like. In some cases it is desirable to include isotonic agents, such as sugars, sodium chloride, and the like. Prolonged absorption of the injectable pharmaceutical form can be brought about by the use of agents delaying absorption, such as aluminum monostearate and gelatin.

[0804] For intravenous injections or drips or infusions, a therapeutic agent described herein is formulated in aqueous solutions, preferably in physiologically compatible buffers such as Hank's solution, Ringer's solution, or physiological saline buffer. For transmucosal administration, penetrants appropriate to the barrier to be permeated are used in the formulation. Such penetrants are generally known in the art. For other parenteral injections, appropriate formulations include aqueous or nonaqueous solutions, preferably with physiologically compatible buffers or excipients. Such excipients are known.

[0805] Parenteral injections may involve bolus injection or continuous infusion. Formulations for injection may be presented in unit dosage form, e.g., in ampoules or in multi-dose containers, with an added preservative. The pharmaceutical composition described herein may be in a form suitable for parenteral injection as a sterile suspensions, solutions or emulsions in oily or aqueous vehicles, and may contain formulatory agents such as suspending, stabilizing and/or dispersing agents. In one aspect, the active ingredient is in powder form for constitution with a suitable vehicle, e.g., sterile pyrogen-free water, before use.

[0806] For administration by inhalation, a therapeutic agent is formulated for use as an aerosol, a mist or a powder. Pharmaceutical compositions described herein are conveniently delivered in the form of an aerosol spray presentation from pressurized packs or a nebuliser, with the use of a suitable propellant, e.g., dichlorodifluoromethane, trichlorofluoromethane, dichlorotetrafluoroethane, carbon dioxide or other suitable gas. In the case of a pressurized aerosol, the dosage unit may be determined by providing a valve to deliver a metered amount. Capsules and cartridges of, such as, by way of example only, gelatin for use in an inhaler or insufflator may be formulated containing a powder mix of the therapeutic agent described herein and a suitable powder base such as lactose or starch.

[0807] Representative intranasal formulations are described in, for example, U.S. Pat. Nos. 4,476,116, 5,116,817 and 6,391,452. Formulations that include a therapeutic agent are prepared as solutions in saline, employing benzyl alcohol or other suitable preservatives, fluorocarbons, and/or other solubilizing or dispersing agents known in the art. See, for example, Ansel, H. C. et al., Pharmaceutical Dosage Forms and Drug Delivey Systems, Sixth Ed. (1995). Preferably these compositions and formulations are prepared with suitable nontoxic pharmaceutically acceptable ingredients. These ingredients are known to those skilled in the preparation of nasal dosage forms and some of these can be found in REMINGTON: THE SCIENCE AND PRACTICE OF PHARMACY, 21st edition, 2005. The choice of suitable carriers is dependent upon the exact nature of the nasal dosage form desired, e.g., solutions, suspensions, ointments, or gels. Nasal dosage forms generally contain large amounts of water in addition to the active ingredient. Minor amounts of other ingredients such as pH adjusters, emulsifiers or dispersing agents, preservatives, surfactants, gelling agents, or buffering and other stabilizing and solubilizing agents are optionally present. Preferably, the nasal dosage form should be isotonic with nasal secretions.

[0808] Pharmaceutical preparations for oral use are obtained by mixing one or more solid excipient with one or more of the therapeutic agents described herein, optionally grinding the resulting mixture, and processing the mixture of granules, after adding suitable auxiliaries, if desired, to obtain tablets or dragee cores. Suitable excipients include, for example, fillers such as sugars, including lactose, sucrose, mannitol, or sorbitol; cellulose preparations such as, for example, maize starch, wheat starch, rice starch, potato starch, gelatin, gum tragacanth, methylcellulose, microcrystalline cellulose, hydroxypropylmethylcellulose, sodium carboxymethylcellulose; or others such as: polyvinylpyrrolidone (PVP or povidone) or calcium phosphate. If desired, disintegrating agents are added, such as the cross-linked croscarmellose sodium, polyvinylpyrrolidone, agar, or alginic acid or a salt thereof such as sodium alginate. In some embodiments, dyestuffs or pigments are added to the tablets or dragee coatings for identification or to characterize different combinations of active therapeutic agent doses.

[0809] In some embodiments, pharmaceutical formulations of a therapeutic agent are in the form of a capsules, including push-fit capsules made of gelatin, as well as soft, sealed capsules made of gelatin and a plasticizer, such as glycerol or sorbitol. The push-fit capsules contain the active ingredients in admixture with filler such as lactose, binders such as starches, and/or lubricants such as talc or magnesium stearate and, optionally, stabilizers. In soft capsules, the active therapeutic agent is dissolved or suspended in suitable liquids, such as fatty oils, liquid paraffin, or liquid polyethylene glycols. In some embodiments, stabilizers are added A capsule may be prepared, for example, by placing the bulk blend of the formulation of the therapeutic agent inside of a capsule. In some embodiments, the formulations (non-aqueous suspensions and solutions) are placed in a soft gelatin capsule. In other embodiments, the formulations are placed in standard gelatin capsules or non-gelatin capsules such as capsules comprising HPMC. In other embodiments, the formulation is placed in a sprinkle capsule, wherein the capsule is swallowed whole or the capsule is opened and the contents sprinkled on food prior to eating.

[0810] All formulations for oral administration are in dosages suitable for such administration. In one aspect, solid oral dosage forms are prepared by mixing a therapeutic agent with one or more of the following: antioxidants, flavoring agents, and carrier materials such as binders, suspending agents, disintegration agents, filling agents, surfactants, solubilizers, stabilizers, lubricants, wetting agents, and diluents. In some embodiments, the solid dosage forms disclosed herein are in the form of a tablet, (including a suspension tablet, a fast-melt tablet, a bite-disintegration tablet, a rapid-disintegration tablet, an effervescent tablet, or a caplet), a pill, a powder, a capsule, solid dispersion, solid solution, bioerodible dosage form, controlled release formulations, pulsatile release dosage forms, multiparticulate dosage forms, beads, pellets, granules. In other embodiments, the pharmaceutical formulation is in the form of a powder. Compressed tablets are solid dosage forms prepared by compacting the bulk blend of the formulations described above. In various embodiments, tablets will include one or more flavoring agents. In other embodiments, the tablets will include a film surrounding the final compressed tablet. In some embodiments, the film coating can provide a delayed release of a therapeutic agent from the formulation. In other embodiments, the film coating aids in patient compliance (e.g., Opadry® coatings or sugar coating). Film coatings including Opadry® typically range from about 1% to about 3% of the tablet weight. In some embodiments, solid dosage forms, e.g., tablets, effervescent tablets, and capsules, are prepared by mixing particles of a therapeutic agent with one or more pharmaceutical excipients to form a bulk blend composition. The bulk blend is readily subdivided into equally effective unit dosage forms, such as tablets, pills, and capsules. In some embodiments, the individual unit dosages include film coatings. These formulations are manufactured by conventional formulation techniques.

[0811] In another aspect, dosage forms indude microencapsulated formulations. In some embodiments, one or more other compatible materials are present in the microencapsulation material. Exemplary materials include, but are not limited to, pH modifiers, erosion facilitators, anti-foaming agents, antioxidants, flavoring agents, and carrier materials such as binders, suspending agents, disintegration agents, filling agents, surfactants, solubilizers, stabilizers, lubricants, wetting agents, and diluents. Exemplary useful microencapsulation materials include, but are not limited to, hydroxypropyl cellulose ethers (HPC) such as Klucel® or Nisso HPC, low-substituted hydroxypropyl cellulose ethers (L-HPC), hydroxypropyl methyl cellulose ethers (HPMC) such as Seppifilm-LC, Pharmacoat@, Metolose SR, Methocel®-E, Opadry YS, PrimaFlo, Benecel MP824, and Benecel MP843, methylcellulose polymers such as Methocel®-A, hydroxypropylmethylcellulose acetate stearate Aqoat (HF-LS, HF-LG,HF-MS) and Metolose), Ethylcelluloses (EC) and mixtures thereof such as E461, Ethocel®, Aqualon®-EC, Surelease®, Polyvinyl alcohol (PVA) such as Opadry AMB, hydroxyethylcelluloses such as Natrosol®, carboxymethylcelluloses and salts of carboxymethylcelluloses (CMC) such as Aqualon®-CMC, polyvinyl alcohol and polyethylene glycol co-polymers such as Kollicoat IR®, monoglycerides (Myverol), triglycerides (KLX), polyethylene glycols, modified food starch, aciylic polymers and mixtures of acrylic polymers with cellulose ethers such as Eudragit® EPO, Eudragit® L30D-55, Eudragit® FS 30D Eudragit® L100-55, Eudragit® L100, Eudragit® S100, Eudragit® RD100, Eudragit® E100, Eudragit® L12.5, Eudragit® S12.5, Eudragit® NE30D, and Eudragit® NE 40D, cellulose acetate phthalate, sepifilms such as mixtures of HPMC and stearic acid, cyclodextrins, and mixtures of these materials.

[0812] Liquid formulation dosage forms for oral administration are optionally aqueous suspensions selected from the group including, but not limited to, pharmaceutically acceptable aqueous oral dispersions, emulsions, solutions, elixirs, gels, and syrups. See, e.g., Singh et al., Encyclopedia of Pharmaceutical Technology, 2nd Ed, pp. 754-757 (2002). In addition to therapeutic agent the liquid dosage forms optionally include additives, such as: (a) disintegrating agents; (b) dispersing agents; (c) wetting agents; (d) at least one preservative, (e) viscosity enhancing agents, (f) at least one sweetening agent, and (g) at least one flavoring agent. In some embodiments, the aqueous dispersions further includes a crystal-forming inhibitor.

[0813] In some embodiments, the pharmaceutical formulations described herein are self-emulsifying drug delivery systems (SEDDS). Emulsions are dispersions of one immiscible phase in another, usually in the form of droplets. Generally, emulsions are created by vigorous mechanical dispersion. SEDDS, as opposed to emulsions or microemulsions, spontaneously form emulsions when added to an excess of water without any external mechanical dispersion or agitation. An advantage of SEDDS is that only gentle mixing is required to distribute the droplets throughout the solution. Additionally, water or the aqueous phase is optionally added just prior to administration, which ensures stability of an unstable or hydrophobic active ingredient. Thus, the SEDDS provides an effective delivery system for oral and parenteral delivery of hydrophobic active ingredients. In some embodiments, SEDDS provides improvements in the bioavailability of hydrophobic active ingredients. Methods of producing self-emulsifying dosage forms include, but are not limited to, for example, U.S. Pat. Nos. 5,858,401, 6,667,048, and 6,960,563.

[0814] Buccal formulations that include a therapeutic agent are administered using a variety of formulations known in the art. For example, such formulations include, but are not limited to, U.S. Pat. Nos. 4,229,447, 4,596,795, 4,755,386, and 5,739,136. In addition, the buccal dosage forms described herein can further include a bioerodible (hydrolysable) polymeric carrier that also serves to adhere the dosage form to the buccal mucosa. For buccal or sublingual administration, the compositions may take the form of tablets, lozenges, or gels formulated in a conventional manner.

[0815] For intravenous injections, a therapeutic agent is optionally formulated in aqueous solutions, preferably in physiologically compatible buffers such as Hank's solution, Ringer's solution, or physiological saline buffer. For transmucosal administration, penetrants appropriate to the barrier to be permeated are used in the formulation. For other parenteral injections, appropriate formulations include aqueous or nonaqueous solutions, preferably with physiologically compatible buffers or excipients.

[0816] Parenteral injections optionally involve bolus injection or continuous infusion. Formulations for injection are optionally presented in unit dosage form, e.g., in ampoules or in multi dose containers, with an added preservative. In some embodiments, a pharmaceutical composition described herein is in a form suitable for parenteral injection as a sterile suspensions, solutions or emulsions in oily or aqueous vehicles, and contain formulatory agents such as suspending, stabilizing and/or dispersing agents. Pharmaceutical formulations for parenteral administration include aqueous solutions of an agent that modulates the activity of a carotid body in water soluble form Additionally, suspensions of an agent that modulates the activity of a carotid body are optionally prepared as appropriate, e.g., oily injection suspensions.

[0817] Conventional formulation techniques include, e.g., one or a combination of methods: (1) dry mixing, (2) direct compression, (3) milling (4) dry or non-aqueous granulation, (5) wet granulation, or (6) fusion. Other methods include, e.g., spray drying, pan coating, melt granulation, granulation, fluidized bed spray drying or coating (e.g., wurster coating), tangential coating, top spraying, tableting, extruding and the like.

[0818] Suitable carriers for use in the solid dosage forms described herein include, but are not limited to, acacia, gelatin, colloidal silicon dioxide, calcium glycerophosphate, calcium lactate, maltodextrin, glycerine, magnesium silicate, sodium caseinate, soy lecithin, sodium chloride, tricalcium phosphate, dipotassium phosphate, sodium stearoyl lactylate, carrageenan, monoglyceride, diglyceride, pregelatinized starch, hydroxypropylmethylcellulose, hydroxypropylmethylcellulose acetate stearate, sucrose, microcrystalline cellulose, lactose, mannitol and the like.

[0819] Suitable filling agents for use in the solid dosage forms described herein include, but are not limited to, lactose, calcium carbonate, calcium phosphate, dibasic calcium phosphate, calcium sulfate, microciystalline cellulose, cellulose powder, dextrose, dextrates, dextran, starches, pregelatinized starch, hydroxypropylmethycellulose (HPMC), hydroxypropylmethycellulose phthalate, hydroxypropylmethylcellulose acetate stearate (HPMCAS), sucrose, xylitol, lactitol, mannitol, sorbitol, sodium chloride, polyethylene glycol, and the like.

[0820] Suitable disintegrants for use in the solid dosage forms described herein include, but are not limited to, natural starch such as corn starch or potato starch, a pregelatinized starch, or sodium starch glycolate, a cellulose such as methylcrystalline cellulose, methylcellulose, microciystalline cellulose, croscarmellose, or a cross-linked cellulose, such as cross-linked sodium carboxymethylcellulose, cross-linked carboxymethylcellulose, or cross-linked croscarmellose, a cross-linked starch such as sodium starch glycolate, a cross-linked polymer such as crospovidone, a cross-linked polyvinylpyrrolidone, alginate such as alginic acid or a salt of alginic acid such as sodium alginate, a gum such as agar, guar, locust bean, Karaya, pectin, or tragacanth, sodium starch glycolate, bentonite, sodium lauryl sulfate, sodium lauryl sulfate in combination starch, and the like.

[0821] Binders impart cohesiveness to solid oral dosage form formulations: for powder filled capsule formulation, they aid in plug formation that can be filled into soft or hard shell capsules and for tablet formulation, they ensure the tablet remaining intact after compression and help assure blend unifomity prior to a compression or fill step. Materials suitable for use as binders in the solid dosage forms described herein include, but are not limited to, carboxymethylcellulose, methylcellulose, hydroxypropylmethylcellulose, hydroxypropylmethylcellulose acetate stearate, hydroxyethylcellulose, hydroxypropylcellulose, ethylcellulose, and microcrystalline cellulose, microcrystalline dextrose, amylose, magnesium aluminum silicate, polysaccharide acids, bentonites, gelatin, polyvinylpyrrolidone/vinyl acetate copolymer, crospovidone, povidone, starch, pregelatinized starch, tragacanth, dextrin, a sugar, such as sucrose, glucose, dextrose, molasses, mannitol, sorbitol, xylitol, lactose, a natural or synthetic gum such as acacia, tragacanth, ghatti gum, mucilage of isapol husks, starch, polyvinylpyrrolidone, larch arabogalactan, polyethylene glycol, waxes, sodium alginate, and the like.

[0822] In general, binder levels of 20-70% are used in powder-filled gelatin capsule formulations. Binder usage level in tablet formulations vanes whether direct compression, wet granulation, roller compaction, or usage of other excipients such as fillers which itself can act as moderate binder. Binder levels of up to 70% in tablet formulations is common.

[0823] Suitable lubricants or glidants for use in the solid dosage forms described herein include, but are not limited to, stearic acid, calcium hydroxide, talc, corn starch, sodium stearyl fumerate, alkali-metal and alkaline earth metal salts, such as aluminum, calcium, magnesium, zinc, stearic acid, sodium stearates, magnesium stearate, zinc stearate, waxes, Stearowet®, boric acid, sodium benzoate, sodium acetate, sodium chloride, leucine, a polyethylene glycol or a methoxypolyethylene glycol such as Carbowax™, PEG 4000, PEG 5000, PEG 6000, propylene glycol, sodium oleate, glyceryl behenate, glyceryl palmitostearate, glyceryl benzoate, magnesium or sodium lauryl sulfate, and the like.

[0824] Suitable diluents for use in the solid dosage forms described herein include, but are not limited to, sugars (including lactose, sucrose, and dextrose), polysaccharides (including dextrates and maltodextrin), polyols (including mannitol, xylitol, and sorbitol), cyclodextrins and the like.

[0825] Suitable wetting agents for use in the solid dosage forms described herein include, for example, oleic acid, glyceryl monostearate, sorbitan monooleate, sorbitan monolaurate, triethanolamine oleate, polyoxyethylene sorbitan monooleate, polyoxyethylene sorbitan monolaurate, quaternary ammonium compounds (e.g., Polyquat 10®), sodium oleate, sodium lauryl sulfate, magnesium stearate, sodium docusate, triacetin, vitamin E TPGS and the like.

[0826] Suitable surfactants for use in the solid dosage forms described herein include, for example, sodium lauryl sulfate, sorbitan monooleate, polyoxyethylene sorbitan monooleate, polysorbates, polaxomers, bile salts, glyceryl monostearate, copolymers of ethylene oxide and propylene oxide, e.g., Pluronic® (BASF), and the like.

[0827] Suitable suspending agents for use in the solid dosage forms described here include, but are not limited to, polyvinylpyrrolidone, e.g., polyvinylpyrrolidone K12, polyvinylpyrrolidone K17, polyvinylpyrrolidone K25, or polyvinylpyrrolidone K30, polyethylene glycol, e.g., the polyethylene glycol can have a molecular weight of about 300 to about 6000, or about 3350 to about 4000, or about 7000 to about 5400, vinyl pyrrolidone/vinyl acetate copolymer (S630), sodium carboxymethylcellulose, methylcellulose, hydroxy-propylmethylcellulose, polysorbate-80, hydroxyethylcellulose, sodium alginate, gums, such as, e.g., gum tragacanth and gum acacia, guar gum, xanthans, including xanthan gum, sugars, cellulosics, such as, e.g., sodium carboxymethylcellulose, methylcellulose, sodium carboxymethylcellulose, hydroxypropylmethylcellulose, hydroxyethylcellulose, polysorbate-80, sodium alginate, polyethoxylated sorbitan monolaurate, polyethoxylated sorbitan monolaurate, povidone and the like.

[0828] Suitable antioxidants for use in the solid dosage forms described herein include, for example, e.g., butylated hydroxytoluene (BHT), sodium ascorbate, and tocopherol.

[0829] It should be appreciated that there is considerable overlap between additives used in the solid dosage forms described herein. Thus, the above-listed additives should be taken as merely exemplary, and not limiting, of the types of additives that can be included in solid dosage forms of the pharmaceutical compositions described herein. The amounts of such additives can be readily determined by one skilled in the art, according to the particular properties desired.

[0830] In various embodiments, the particles of a therapeutic agents and one or more excipients are dry blended and compressed into a mass, such as a tablet, having a hardness sufficient to provide a pharmaceutical composition that substantially disintegrates within less than about 30 minutes, less than about 35 minutes, less than about 40 minutes, less than about 45 minutes, less than about 50 minutes, less than about 55 minutes, or less than about 60 minutes, after oral administration, thereby releasing the formulation into the gastrointestinal fluid.

[0831] In other embodiments, a powder including a therapeutic agent is formulated to include one or more pharmaceutical excipients and flavors. Such a powder is prepared, for example, by mixing the therapeutic agent and optional pharmaceutical excipients to form a bulk blend composition. Additional embodiments also include a suspending agent and/or a wetting agent. This bulk blend is uniformly subdivided into unit dosage packaging or multi-dosage packaging units.

[0832] In still other embodiments, effervescent powders are also prepared Effervescent salts have been used to disperse medicines in water for oral administration.

[0833] In some embodiments, the pharmaceutical dosage forms are formulated to provide a controlled release of a therapeutic agent. Controlled release refers to the release of the therapeutic agent from a dosage form in which it is incorporated according to a desired profile over an extended period of time. Controlled release profiles include, for example, sustained release, prolonged release, pulsatile release, and delayed release profiles. In contrast to immediate release compositions, controlled release compositions allow delivery of an agent to a subject over an extended period of time according to a predetermined profile. Such release rates can provide therapeutically effective levels of agent for an extended period of time and thereby provide a longer period of pharmacologic response while minimizing side effects as compared to conventional rapid release dosage forms. Such longer periods of response provide for many inherent benefits that are not achieved with the corresponding short acting, immediate release preparations.

[0834] In some embodiments, the solid dosage forms described herein are formulated as enteric coated delayed release oral dosage forms, i.e., as an oral dosage form of a pharmaceutical composition as described herein which utilizes an enteric coating to affect release in the small intestine or large intestine. In one aspect, the enteric coated dosage form is a compressed or molded or extruded tablet/mold (coated or uncoated) containing granules, powder, pellets, beads or particles of the active ingredient and/or other composition components, which are themselves coated or uncoated In one aspect, the enteric coated oral dosage form is in the form of a capsule containing pellets, beads or granules, which include a therapeutic agent that are coated or uncoated.

[0835] Any coatings should be applied to a sufficient thickness such that the entire coating does not dissolve in the gastrointestinal fluids at pH below about 5, but does dissolve at pH about 5 and above. Coatings are typically selected from any of the following: Shellac—this coating dissolves in media of pH >7; Acrylic polymers—examples of suitable acrylic polymers include methacrylic acid copolymers and ammonium methacylate copolymers. The Eudragit series E, L, S, RL, RS and NE (Rohm Pharma) are available as solubilized in organic solvent, aqueous dispersion, or diy powders. The Eudragit series RL, NE, and RS are insoluble in the gastrointestinal tract but are permeable and are used primarily for colonic targeting. The Eudragit series E dissolve in the stomach The Eudragit series L, L-30D and S are insoluble in stomach and dissolve in the intestine; Poly Vinyl Acetate Phthalate (PVAP)—PVAP dissolves in pH >5, and it is much less permeable to water vapor and gastric fluids. Conventional coating techniques such as spray or pan coating are employed to apply coatings. The coating thickness must be sufficient to ensure that the oral dosage form remains intact until the desired site of topical delivery in the intestinal tract is reached.

[0836] In other embodiments, the formulations described herein are delivered using a pulsatile dosage form. A pulsatile dosage form is capable of providing one or more immediate release pulses at predetermined time points after a controlled lag time or at specific sites. Exemplary pulsatile dosage forms and methods of their manufacture are disclosed in U.S. Pat. Nos. 5,011,692, 5,017,381, 5,229,135, 5,840,329 and 5,837,284. In one embodiment, the pulsatile dosage form includes at least two groups of particles, (i.e. multiparticulate) each containing the formulation described herein. The first group of particles provides a substantially immediate dose of a therapeutic agent upon ingestion by a mammal. The first group of particles can be either uncoated or include a coating and/or sealant. In one aspect, the second group of particles comprises coated particles. The coating on the second group of particles provides a delay of from about 2 hours to about 7 hours following ingestion before release of the second dose. Suitable coatings for pharmaceutical compositions are described herein or known in the art.

[0837] In some embodiments, pharmaceutical formulations are provided that include particles of a therapeutic agent and at least one dispersing agent or suspending agent for oral administration to a subject. The formulations may be a powder and/or granules for suspension, and upon admixture with water, a substantially uniform suspension is obtained.

[0838] In some embodiments, particles formulated for controlled release are incorporated in a gel or a patch or a wound dressing.

[0839] In one aspect, liquid formulation dosage forms for oral administration and/or for topical administration as a wash are in the form of aqueous suspensions selected from the group including, but not limited to, pharmaceutically acceptable aqueous oral dispersions, emulsions, solutions, elixirs, gels, and syrups. See, e.g., Singh et al., Encyclopedia of Pharmaceutical Technology, 2nd Ed, pp. 754-757 (2002). In addition to the particles of a therapeutic agent, the liquid dosage forms include additives, such as: (a) disintegrating agents; (b) dispersing agents; (c) wetting agents; (d) at least one preservative, (e) viscosity enhancing agents, (f) at least one sweetening agent, and (g) at least one flavoring agent. In some embodiments, the aqueous dispersions can further include a ciystalline inhibitor.

[0840] In some embodiments, the liquid formulations also include inert diluents commonly used in the art, such as water or other solvents, solubilizing agents, and emulsifiers. Exemplary emulsifiers are ethyl alcohol, isopropyl alcohol, ethyl carbonate, ethyl acetate, benzyl alcohol, benzyl benzoate, propyleneglycol, 1,3-butyleneglycol, dimethylformamide, sodium lauryl sulfate, sodium doccusate, cholesterol, cholesterol esters, taurocholic acid, phosphotidylcholine, oils, such as cottonseed oil, groundnut oil, corn germ oil, olive oil, castor oil, and sesame oil, glycerol, tetrahydrofurfuryl alcohol, polyethylene glycols, fatty acid esters of sorbitan, or mixtures of these substances, and the like.

[0841] Furthermore, pharmaceutical compositions optionally include one or more pH adjusting agents or buffering agents, including acids such as acetic, boric, citric, lactic, phosphoric and hydrochloric acids; bases such as sodium hydroxide, sodium phosphate, sodium borate, sodium citrate, sodium acetate, sodium lactate and tris-hydroxymethylaminomethane; and buffers such as citrate/dextrose, sodium bicarbonate and ammonium chloride. Such acids, bases and buffers are included in an amount required to maintain pH of the composition in an acceptable range.

[0842] Additionally, pharmaceutical compositions optionally include one or more salts in an amount required to bring osmolality of the composition into an acceptable range. Such salts include those having sodium, potassium or ammonium cations and chloride, citrate, ascorbate, borate, phosphate, bicarbonate, sulfate, thiosulfate or bisulfite anions; suitable salts include sodium chloride, potassium chloride, sodium thiosulfate, sodium bisulfite and ammonium sulfate.

[0843] Other pharmaceutical compositions optionally include one or more preservatives to inhibit microbial activity. Suitable preservatives include mercury-containing substances such as merfen and thiomersal; stabilized chlorine dioxide; and quaternary ammonium compounds such as benzalkonium chloride, cetyltrimethylammonium bromide and cetylpyridinium chloride.

[0844] In one embodiment, the aqueous suspensions and dispersions described herein remain in a homogenous state, as defined in The USP Pharmacists' Pharmacopeia (2005 edition, chapter 905), for at least 4 hours. In one embodiment, an aqueous suspension is re-suspended into a homogenous suspension by physical agitation lasting less than 1 minute. In still another embodiment, no agitation is necessary to maintain a homogeneous aqueous dispersion.

[0845] Examples of disintegrating agents for use in the aqueous suspensions and dispersions include, but are not limited to, a starch, e.g., a natural starch such as corn starch or potato starch, a pregelatinized starch, or sodium starch glycolate; a cellulose such as methylcrystalline cellulose, methylcellulose, croscarmellose, or a cross-linked cellulose, such as cross-linked sodium carboxymethylcellulose, cross-linked carboxymethylcellulose, or cross-linked croscarmellose; a cross-linked starch such as sodium starch glycolate; a cross-linked polymer such as crospovidone; a cross-linked polyvinylpyrrolidone; alginate such as alginic acid or a salt of alginic acid such as sodium alginate; a gum such as agar, guar, locust bean, Karaya, pectin, or tragacanth; sodium starch glycolate; bentonite; a natural sponge; a surfactant; a resin such as a cation-exchange resin; citrus pulp; sodium lauryl sulfate; sodium lauryl sulfate in combination starch; and the like.

[0846] In some embodiments, the dispersing agents suitable for the aqueous suspensions and dispersions described herein include, for example, hydrophilic polymers, electrolytes, Tween® 60 or 80, PEG, polyvinylpyrrolidone, and the carbohydrate-based dispersing agents such as, for example, hydroxypropylcellulose and hydroxypropyl cellulose ethers, hydroxypropyl methylcellulose and hydroxypropyl methylcellulose ethers, carboxymethylcellulose sodium, methylcellulose, hydroxyethylcellulose, hydroxypropylmethyl-cellulose phthalate, hydroxypropylmethyl-cellulose acetate stearate, noncrystalline cellulose, magnesium aluminum silicate, triethanolamine, polyvinyl alcohol (PVA), polyvinylpyrrolidone/vinyl acetate copolymer, 4-(1,1,3,3-tetramethylbutyl)-phenol polymer with ethylene oxide and formaldehyde (also known as tyloxapol), poloxamers; and poloxamines. In other embodiments, the dispersing agent is selected from a group not comprising one of the following agents: hydrophilic polymers; electrolytes; Tween® 60 or 80; PEG; polyvinylpyrrolidone (PVP); hydroxypropylcellulose and hydroxypropyl cellulose ethers; hydroxypropyl methylcellulose and hydroxypropyl methylcellulose ethers; carboxymethylcellulose sodium; methylcellulose; hydroxyethylcellulose; hydroxypropylmethyl-cellulose phthalate; hydroxypropylmethyl-cellulose acetate stearate; non-crystalline cellulose; magnesium aluminum silicate; triethanolamine; polyvinyl alcohol (PVA); 4-(1,1,3,3-tetramethylbutyl)-phenol polymer with ethylene oxide and formaldehyde; poloxamers; or poloxamines.

[0847] Wetting agents suitable for the aqueous suspensions and dispersions described herein include, but are not limited to, cetyl alcohol, glycerol monostearate, polyoxyethylene sorbitan fatty acid esters (e.g., the commercially available Tweens® such as e.g., Tween 20® and Tween 80®, and polyethylene glycols, oleic acid, glyceryl monostearate, sorbitan monooleate, sorbitan monolaurate, triethanolamine oleate, polyoxyethylene sorbitan monooleate, polyoxyethylene sorbitan monolaurate, sodium oleate, sodium lauyl sulfate, sodium docusate, triacetin, vitamin E TPGS, sodium taurocholate, simethicone, phosphotidylcholine and the like.

[0848] Suitable preservatives for the aqueous suspensions or dispersions described herein include, for example, potassium sorbate, parabens (e.g., methylparaben and propylparaben), benzoic acid and its salts, other esters of parahydroxybenzoic acid such as butylparaben, alcohols such as ethyl alcohol or benzyl alcohol, phenolic compounds such as phenol, or quaternary compounds such as benzalkonium chloride. Preservatives, as used herein, are incorporated into the dosage form at a concentration sufficient to inhibit microbial growth.

[0849] Suitable viscosity enhancing agents for the aqueous suspensions or dispersions described herein include, but are not limited to, methyl cellulose, xanthan gum, carboxymethyl cellulose, hydroxypropyl cellulose, hydroxypropylmethyl cellulose, Plasdon® S-630, carbomer, polyvinyl alcohol, alginates, acacia, chitosans and combinations thereof. The concentration of the viscosity enhancing agent will depend upon the agent selected and the viscosity desired.

[0850] Examples of sweetening agents suitable for the aqueous suspensions or dispersions described herein include, for example, acacia syrup, acesulfame K, alitame, aspartame, chocolate, cinnamon, citrus, cocoa, cyclamate, dextrose, fructose, ginger, glycyrrhetinate, glycyrrhiza (licorice) syrup, monoammonium glyrrhizinate (MagnaSweet®), malitol, mannitol, menthol, neohesperidine DC, neotame, Prosweet® Powder, saccharin, sorbitol, stevia, sucralose, sucrose, sodium saccharin, saccharin, aspartame, acesulfame potassium, mannitol, sucralose, tagatose, thaumatin, vanilla, xylitol, or any combination thereof.

[0851] In some embodiments, a therapeutic agent is prepared as transdermal dosage form. In some embodiments, the transdermal formulations described herein include at least three components: (1) a therapeutic agent; (2) a penetration enhancer; and (3) an optional aqueous adjuvant. In some embodiments the transdermal formulations include additional components such as, but not limited to, gelling agents, creams and ointment bases, and the like. In some embodiments, the transdermal formulation is presented as a patch or a wound dressing. In some embodiments, the transdermal formulation further include a woven or non-woven backing material to enhance absorption and prevent the removal of the transdermal formulation from the skin. In other embodiments, the transdermal formulations described herein can maintain a saturated or supersaturated state to promote diffusion into the skin.

[0852] In one aspect, formulations suitable for transdermal administration of a therapeutic agent described herein employ transdermal delivery devices and transdermal deliveiy patches and can be lipophilic emulsions or buffered, aqueous solutions, dissolved and/or dispersed in a polymer or an adhesive. In one aspect, such patches are constructed for continuous, pulsatile, or on demand delivery of pharmaceutical agents. Still further, transdermal delivery of the therapeutic agents described herein can be accomplished by means of iontophoretic patches and the like. In one aspect, transdermal patches provide controlled delivery of a therapeutic agent. In one aspect, transdermal devices are in the form of a bandage comprising a backing member, a reservoir containing the therapeutic agent optionally with carriers, optionally a rate controlling barrier to deliver the therapeutic agent to the skin of the host at a controlled and predetermined rate over a prolonged period of time, and means to secure the device to the skin.

[0853] In further embodiments, topical formulations include gel formulations (e.g., gel patches which adhere to the skin). In some of such embodiments, a gel composition includes any polymer that forms a gel upon contact with the body (e.g., gel formulations comprising hyaluronic acid, pluronic polymers, poly(lactic-co-glycolic acid (PLGA)-based polymers or the like). In some forms of the compositions, the formulation comprises a low-melting wax such as, but not limited to, a mixture of fatty acid glycerides, optionally in combination with cocoa butter which is first melted Optionally, the formulations further comprise a moisturizing agent.

[0854] In certain embodiments, delivery systems for pharmaceutical therapeutic agents may be employed, such as, for example, liposomes and emulsions. In certain embodiments, compositions provided herein can also include an mucoadhesive polymer, selected from among, for example, carboxymethylcellulose, carbomer (acrylic acid polymer), poly(methylmethacrylate), polyacrylamide, polycarbophil, acrylic acid/butyl acrylate copolymer, sodium alginate and dextran.

[0855] In some embodiments, a therapeutic agent described herein may be administered topically and can be formulated into a variety of topically administrable compositions, such as solutions, suspensions, lotions, gels, pastes, medicated sticks, balms, creams or ointments. Such pharmaceutical therapeutic agents can contain solubilizers, stabilizers, tonicity enhancing agents, buffers and preservatives.

### F. Methods of Characterizing an Inflammatory Disease

[0856] In an aspect, provided herein, are methods of characterizing an inflammatory disease of a subject, the method comprising: (a) assaying a sample obtained from a subject with an inflammatory disease to identify the presence of a risk genotype or transcriptional risk profile; and (b) characterizing the inflammatory disease as a severe or refractory form of the inflammatory disease, provided the risk genotype or the transcriptional risk profile is detected in (a). In some cases, the inflammatory disease is inflammatory bowel disease (IBD), such as Crohn's disease (CD) or UC. In some instances, the IBD is characterized as refractory. In some instances, the IBD is characterized as “severe,” which is relative to a range of disease severity typically observed in IBD patients. In some cases, the IBD is characterized as mild or less severe (e.g, CD1) as compared to the severe forms of disease (e.g., CD3).

[0857] A “severe” disease course may include more incidences of surgery (e.g., small bowel resection, colectomy), and more reoccurrence of symptoms following a surgery. In addition, a subject with a “severe” form of IBD (such as those in CD3) experiences more flare-ups as compared to a CD1 subject. A subject with severe IBD is more likely to experience complications associated with the disease, such as stricturing disease, penetrating disease, or stricturing and penetrating disease. Stricturing disease results from long term intestinal inflammation or intestinal fibrosis that leads to the formation of scar tissue in the intestinal wall (fibrostenosis) or swelling. Both outcomes can cause narrowing, or obstruction, and are known as either fibrotic or inflammatory strictures. Severe strictures can lead to blockage of the intestine, leading to abdominal pain, bloating, nausea and the inability to pass stool. Penetrating disease is the formation of fistula or extraluminal abscesses of the intestine. Severe disease may also be associated with a non-response or loss-of-response to a standard IBD therapy, such as an anti-tumor necrosis factor (TNF) therapy.

[0858] In some embodiments, the risk genotype comprises a polymorphism from Table 1 (CD1), which is associated with, and therefore predictive of, a less severe form of disease as compared to CD3. In some embodiments, the risk genotype comprises a polymorphism from Table 2 (CD3), which is associated with, and therefore predictive of, a more severe form of disease as compared to CD1. In some embodiments, the risk genotype comprises any one of SEQ ID NOS: 1-439, each of which is associated with, and therefore predictive of, a severe form of disease as compared to CD1. In some embodiments, the risk genotype detected comprises a combination of polymorphisms from Table 1 or Table 2. In some embodiments, a single polymorphism from Table 1 or Table 2 is detected.

[0859] In some embodiments, the transcriptomic risk signature comprises one or more genes from Table 3 and 4. In some cases, the transcriptomic risk signature comprises: (a) a high level of expression of at least one of phosphodiesterase 4C (PDE4C), intercellular adhesion molecule 3 (ICAM3), interleukin 18 binding protein (IL18BP), and oncostatin-M-specific receptor subunit (OSMR), as compared to a reference level; and (b) a low level of expression of SMAD Family Member 3 (SMAD3), as compared to a reference level.

[0860] Provided herein are methods of selecting a subject for treatment with a therapeutic agent disclosed herein (e.g., agonist of ADCY7, inhibitor of PDE4), provided the subject has an inflammatory disease that has been characterized as severe. In some instances, the subject is not administered a standard IBD therapy, such as an anti-TNF inhibitor, provided the inflammatory disease is characterized as severe. In some instances, the subject is administered a therapeutically effective amount of an agonist of ADCY7. In some instances, the subject is administered a therapeutically effective amount of an inhibitor of PDE4.

[0861] Provided herein are methods of characterizing and inflammatoiy bowel disease (IBD), such as Crohn's disease (CD) and ulcerative colitis (UC) in a subject provided that a presence of a transcriptomic risk signature is detected in the subject. Once the transcriptomic risk signature is detected in the subject, in some cases, the subject is administered a therapeutically effective amount of an agonist of ADCY7 or an inhibitor of PDE4, provided the disease is characterized as a severe form of CD (e.g, CD3). In some cases, the subject is selected for treatment with an agonist of ADCY7 or an inhibitor of PDE4, provided the disease is characterized as a severe form of CD (e.g., CD3). The transcriptomic risk signature may involve one gene. Alternatively, the transcriptomic risk signature involves multiple genes, for e.g, 2, 3, 4, 5, 6, 7, 8, 9, 10, 11, 12, 13, 14, 15, 16, or 17 genes described herein.

[0862] Methods disclosed herein comprise characterizing an IBD as a severe form of CD characteristic of CD3, provided that a transcriptomic risk signature is detected in a subject, which in some cases involves detecting a level of protein tyrosine phosphatase, non-receptor type 11 (PTPN11). In some cases, the transcriptomic risk signature is a downregulation of PTPN11, as compared to a normal (e.g, non-diseased individual), or an individual with a less severe form of CD, such as CD1. In some cases, the transcriptomic risk signature is detected by detecting a level of gene expression product expressed from PTPN11. In some cases, the transcriptomic risk signature is detected by detecting a presence of a single nucleotide polymorphism (SNP) associated with the downregulation of PTPN11. In some cases, the SNP is at rs2301756 and comprises a “G” allele, which is provided in SEQ ID NO: 339. In some cases, the SNP is rs7958372 and comprises an “A” allele, which is provided in SEQ ID NO: 408. The transcriptomic signature may be detected with a single SNP. Alternatively, the transcriptomic risk signature may be detected with multiple SNPs described herein, for e.g, both rs2301756 and rs7958372. In some embodiments, a single SNP is detected. In some embodiments, more than one SNP is detected. In some embodiments, methods further comprise administering to the subject a therapeutically effective amount of a therapeutic agent disclosed herein (e.g., agonist of ADYC, inhibitor of PDE4).

[0863] Methods disclosed herein comprise characterizing an IBD as a severe form of CD characteristic of CD3, provided that a transcriptomic risk signature is detected in a subject, which in some cases involves detecting a level of ribosomal protein (RL30). In some cases, the transcriptomic risk signature is a downregulation of RPL30, as compared to anormal (e.g., non-diseased individual), or an individual with a less severe form of CD, such as CD1. In some cases, the transcriptomic risk signature is detected by detecting a level of gene expression product expressed from RPL30. In some cases, the transcriptomic risk signature is detected by detecting a presence of a SNP associated with the downregulation of RPL30. In some cases, the SNP is at rs2877453 and comprises a “C” allele, which is provided in SEQ ID NO: 353. In some embodiments, a single SNP is detected. In some embodiments, more than one SNP is detected In some embodiments, methods further comprise administering to the subject a therapeutically effective amount of a therapeutic agent disclosed herein (e.g., agonist of ADYC, inhibitor of PDE4).

[0864] Methods disclosed herein comprise characterizing an IBD as a severe form of CD characteristic of CD3, provided that a transcriptomic risk signature is detected in a subject, which in some cases involves detecting a level of X-C motif chemokine receptor 1 (XCR1) In some cases, the transcriptomic risk signature is an upregulation of XCR1, as compared to anormal (e.g, non-diseased individual), or an individual with a less severe form of CD, such as CD1. In some cases, the transcriptomic risk signature is detected by detecting a level of gene expression product expressed from XCR1. In some cases, the transcriptomic risk signature is detected by detecting a presence of a SNP associated with the upregulation of XCR1. In some cases, the SNP is selected from the group consisting of a Gat rs36040135 (SEQ ID NO: 378), a “G” at rs13074382 (SEQ ID NO: 379), a “G” at rs13097556 (SEQ ID NO: 380), a “G” at rs2230322 (SEQ ID NO: 381), and an “A” at rs71327010 (SE ID NO: 382). The transcriptomic signature may be detected with a single SNP. Alternatively, the transcriptomic risk signature may be detected with multiple SNPs described herein, for e.g., two or more of rs36040135, rs13074382, rs13097556, rs2230322, and rs71327010. In some embodiments, a single SNP is detected. In some embodiments, more than one SNP is detected. In some embodiments, methods further comprise administering to the subject a therapeutically effective amount of a therapeutic agent disclosed herein (e.g., agonist of ADYC, inhibitor of PDE4).

[0865] Methods disclosed herein comprise characterizing an IBD as a severe form of CD characteristic of CD3, provided that a transcriptomic risk signature is detected in a subject, which in some cases involves detecting a level of HNF1 homeobox A (HNF1A). In some cases, the transcriptomic risk signature is an upregulation of HNF1, as compared to a normal (e.g, non-diseased individual), or an individual with a less severe form of CD, such as CD1. In some cases, the transcriptomic risk signature is detected by detecting a level of gene expression product expressed from HNF1. In some cases, the transcriptomic risk signature is detected by detecting a presence of a SNP associated with the upregulation of HNF1. In some cases, the SNP is selected from the group consisting of a “G” at rs2244608 (SEQ ID NO: 424), a “C” at rs1169302 (SEQ ID NO: 336), and a “G” at rs1169303 (SEQ ID NO: 337). The transcriptomic signature may be detected with a single SNP. Alternatively, the transcriptomic risk signature may be detected with multiple SNPs described herein, e.g, two or more of rs2244608, rs1169302, and rs1169303. In some embodiments, a single SNP is detected In some embodiments, more than one SNP is detected In some embodiments, methods further comprise administering to the subject a therapeutically effective amount of a therapeutic agent disclosed herein (e.g., agonist of ADYC, inhibitor of PDE4).

[0866] Methods disclosed herein comprise characterizing an IBD as a severe form of CD characteristic of CD3, provided that a transcriptomic risk signature is detected in a subject, which in some cases involves detecting a level of ribosomal protein L3 (RPL3). In some cases, the transcriptomic risk signature is a downregulation of RPL3, as compared to a normal (e.g., non-diseased individual), or an individual with a less severe form of CD, such as CD1. In some cases, the transcriptomic risk signature is detected by detecting a level of gene expression product expressed from RPL3 In some cases, the transcriptomic risk signature is detected by detecting a presence of a SNP associated with the downregulation of RPL3. In some cases, the SNP is an “A” at rs6519183, which is provided in SEQ ID NO: 174. In some embodiments, a single SNP is detected. In some embodiments, more than one SNP is detected In some embodiments, methods further comprise administering to the subject a therapeutically effective amount of a therapeutic agent disclosed herein (e.g., agonist of ADYC, inhibitor of PDE4).

[0867] Methods disclosed herein comprise characterizing an IBD as a severe form of CD characteristic of CD3, provided that a transcriptomic risk signature is detected in a subject, which in some cases involves detecting a level of cholinergic receptor muscarinic 3 (CHRM3). In some cases, the transcriptomic risk signature is a upregulation of CHRM3, as compared to a normal (e.g., non-diseased individual), or an individual with a less severe form of CD, such as CD1. In some cases, the transcriptomic risk signature is detected by detecting a level of gene expression product expressed from CHRM3. In some cases, the transcriptomic risk signature is detected by detecting a presence of a SNP associated with the upregulation of CHRM3. In some cases, the SNP is a “C” at rs685548, which is provided in SEQ ID NO: 423. In some embodiments, a single SNP is detected. In some embodiments, more than one SNP is detected. In some embodiments, methods further comprise administering to the subject a therapeutically effective amount of a therapeutic agent disclosed herein (e.g., agonist of ADYC, inhibitor of PDE4).

[0868] Methods disclosed herein comprise characterizing an IBD as a severe form of CD characteristic of CD3, provided that a transcriptomic risk signature is detected in a subject, which in some cases involves detecting a level of DLC1 Rho GTPase activating protein (DLC1). In some cases, the transcriptomic risk signature is a downregulation of DLC1, as compared to a normal (e.g., non-diseased individual), or an individual with a less severe form of CD, such as CD1. In some cases, the transcriptomic risk signature is detected by detecting a level of gene expression product expressed from DLC1. In some cases, the transcriptomic risk signature is detected by detecting a presence of a SNP associated with the downregulation of DLC1. In some cases, the SNP is an “A” at rs11998187A, which is provided in SEQ ID NO: 404. In some embodiments, a single SNP is detected. In some embodiments, more than one SNP is detected In some embodiments, methods further comprise administering to the subject a therapeutically effective amount of a therapeutic agent disclosed herein (e.g., agonist of ADYC, inhibitor of PDE4).

[0869] Methods disclosed herein comprise characterizing an IBD as a severe form of CD characteristic of CD3, provided that a transcriptomic risk signature is detected in a subject, which in some cases involves detecting a level of apolipoprotein B (APOB). In some cases, the transcriptomic risk signature is a downregulation of APOB, as compared to a normal (e.g, non-diseased individual), or an individual with a less severe form of CD, such as CD1. In some cases, the transcriptomic risk signature is detected by detecting a level of gene expression product expressed from APOB. In some cases, the transcriptomic risk signature is detected by detecting a presence of a SNP associated with the downregulation of APOB. In some cases, the SNP is selected from the group consisting of an “A” at rs531819 (SEQ ID NO: 258), a “G” at rs1041968 (SEQ ID NO: 354), a “G” at rs693 (SEQ ID NO: 388), an “A” at rs512535 (SEQ ID NO: 400), a “G” at rs550619 (SEQ ID NO: 406), an “A” at rs570877 (SEQ ID NO: 407), and a “G” at rs12713956 (SEQ ID NO: 437). The transcriptomic signature may be detected with a single SNP. Alternatively, the transcriptomic risk signature may be detected with multiple SNPs described herein, e.g., two or more of rs531819, rs1041968, rs693, rs512535, rs550619, rs570877, and rs12713956. In some embodiments, a single SNP is detected In some embodiments, more than one SNP is detected. In some embodiments, methods further comprise administering to the subject a therapeutically effective amount of a therapeutic agent disclosed herein (e.g., agonist of ADYC, inhibitor of PDE4).

[0870] Methods disclosed herein comprise characterizing an IBD as a severe form of CD characteristic of CD3, provided that a transcriptomic risk signature is detected in a subject, which in some cases involves detecting a level of ribosomal protein L6 (RPL6). In some cases, the transcriptomic risk signature is a downregulation of RPL6, as compared to a normal (e.g, non-diseased individual), or an individual with a less severe form of CD, such as CD1. In some cases, the transcriptomic risk signature is detected by detecting a level of gene expression product expressed from RPL6. In some cases, the transcriptomic risk signature is detected by detecting a presence of a SNP associated with the downregulation of RPL6. In some cases, the SNP is an “A” at rs2301723A, which is provided in SEQ ID NO: 340. In some embodiments, a single SNP is detected. In some embodiments, more than one SNP is detected In some embodiments, methods further comprise administering to the subject a therapeutically effective amount of a therapeutic agent disclosed herein (e.g., agonist of ADYC, inhibitor of PDE4).

[0871] Methods disclosed herein comprise characterizing an IBD as a severe form of CD characteristic of CD3, provided that a transcriptomic risk signature is detected in a subject, which in some cases involves detecting a level of glutamate metabotropic receptor 4 (GRM4). In some cases, the transcriptomic risk signature is an upregulation of GRM4, as compared to a normal (e.g, non-diseased individual), or an individual with a less severe form of CD, such as CD1. In some cases, the transcriptomic risk signature is detected by detecting a level of gene expression product expressed from GRM4. In some cases, the transcriptomic risk signature is detected by detecting a presence of a SNP associated with the upregulation of GRM4. In some cases, the SNP is an “A” at rs2499714A, which is provided in SEQ ID NO: 181. In some embodiments, a single SNP is detected. In some embodiments, more than one SNP is detected In some embodiments, methods further comprise administering to the subject a therapeutically effective amount of a therapeutic agent disclosed herein (e.g., agonist of ADYC, inhibitor of PDE4).

[0872] Methods disclosed herein comprise characterizing an IBD as a severe form of CD characteristic of CD3, provided that a transcriptomic risk signature is detected in a subject, which in some cases involves detecting a level of p21 (RAC1) activated kinase 2 (PAK2). In some cases, the transcriptomic risk signature is a downregulation of PAK2, as compared to a normal (e.g, non-diseased individual), or an individual with a less severe form of CD, such as CD1. In some cases, the transcriptomic risk signature is detected by detecting a level of gene expression product expressed from PAK2. In some cases, the transcriptomic risk signature is detected by detecting a presence of a SNP associated with the downregulation of PAK2. In some cases, the SNP is an “A” at rs6583176, which is provided in SEQ ID NO: 341. In some embodiments, a single SNP is detected. In some embodiments, more than one SNP is detected In some embodiments, methods further comprise administering to the subject a therapeutically effective amount of a therapeutic agent disclosed herein (e.g., agonist of ADYC, inhibitor of PDE4).

[0873] Methods disclosed herein comprise characterizing an IBD as a severe form of CD characteristic of CD3, provided that a transcriptomic risk signature is detected in a subject, which in some cases involves detecting a level of ribosomal protein L18 (RPL18). In some cases, the transcriptomic risk signature is a downregulation of RPL18, as compared to a normal (e.g., non-diseased individual), or an individual with a less severe form of CD, such as CD1. In some cases, the transcriptomic risk signature is detected by detecting a level of gene expression product expressed from RPL18. In some cases, the transcriptomic risk signature is detected by detecting a presence of a SNP associated with the downregulation of RPL18. In some cases, the SNP is an “A” at rs369880, which is provided in SEQ ID NO: 395.

[0874] Methods disclosed herein comprise characterizing an IBD as a severe form of CD characteristic of CD3, provided that a transcriptomic risk signature is detected in a subject, which in some cases involves detecting a level of phosphodiesterase 4C (PDE4C). In some cases, the transcriptomic risk signature is an upregulation of PDE4C, as compared to a normal (e.g, non-diseased individual), or an individual with a less severe form of CD, such as CD1. In some cases, the transcriptomic risk signature is detected by detecting a level of gene expression product expressed from PDE4C. In some cases, the transcriptomic risk signature is detected by detecting a presence of a SNP associated with the upregulation of PDE4C. In some cases, the SNP is a “G” at rs57884093G, which is provided in SEQ ID NO: 396. In some embodiments, a single SNP is detected. In some embodiments, more than one SNP is detected In some embodiments, methods further comprise administering to the subject a therapeutically effective amount of a therapeutic agent disclosed herein (e.g., agonist of ADYC, inhibitor of PDE4).

[0875] Methods disclosed herein comprise characterizing an IBD as a severe form of CD characteristic of CD3, provided that a transcriptomic risk signature is detected in a subject, which in some cases involves detecting a level of protein kinase C alpha (PRKCA). In some cases, the transcriptomic risk signature is an upregulation or downregulation of PRKCA, as compared to a normal (e.g., non-diseased individual), or an individual with a less severe form of CD, such as CD1. In some cases, the transcriptomic risk signature is detected by detecting a level of gene expression product expressed from PRKCA In some cases, the transcriptomic risk signature is detected by detecting a presence of a SNP associated with the upregulation or downregulation of PRKCA. In some cases, the SNP is an “A” at rs9896905, which is provided in SEQ ID NO: 321. In some embodiments, a single SNP is detected. In some embodiments, more than one SNP is detected In some embodiments, methods further comprise administering to the subject a therapeutically effective amount of a therapeutic agent disclosed herein (e.g., agonist of ADYC, inhibitor of PDE4).

[0876] Methods disclosed herein comprise characterizing an IBD as a severe form of CD characteristic of CD3, provided that a transcriptomic risk signature is detected in a subject, which in some cases involves detecting a level of protein phosphatase 2 catalytic subunit alpha (PPP2CA). In some cases, the transcriptomic risk signature is a downregulation of PPP2CA, as compared to a normal (e.g., non-diseased individual), or an individual with a less severe form of CD, such as CD1. In some cases, the transcriptomic risk signature is detected by detecting a level of gene expression product expressed from PPP2CA. In some cases, the transcriptomic risk signature is detected by detecting a presence of a SNP associated with the downregulation of PPP2CA In some cases, the SNP is an “A” at rs7704116, which is provided in SEQ ID NO: 348. In some embodiments, a single SNP is detected In some embodiments, more than one SNP is detected In some embodiments, methods further comprise administering to the subject a therapeutically effective amount of a therapeutic agent disclosed herein (e.g., agonist of ADYC, inhibitor of PDE4).

[0877] Methods disclosed herein comprise characterizing an IBD as a severe form of CD characteristic of CD3, provided that a transcriptomic risk signature is detected in a subject, which in some cases involves detecting a level of phosphatidylinositol-4-phosphate 5-kinase type 1 gamma (PIP5K1C). In some cases, the transcriptomic risk signature is an upregulation or a downregulation of PIP5K1C, as compared to anormal (e.g., non-diseased individual), or an individual with a less severe form of CD, such as CD1. In some cases, the transcriptomic risk signature is detected by detecting a level of gene expression product expressed from PIP5K1C. In some cases, the transcriptomic risk signature is detected by detecting a presence of a SNP associated with the downregulation of PIP5K1C. In some cases, the SNP is an “A” at rs12984273, which is provided in SEQ ID NO: 405. In some embodiments, a single SNP is detected. In some embodiments, more than one SNP is detected In some embodiments, methods further comprise administering to the subject a therapeutically effective amount of a therapeutic agent disclosed herein (e.g., agonist of ADYC, inhibitor of PDE4).

[0878] Methods disclosed herein comprise characterizing an IBD as a severe form of CD characteristic of CD3, provided that a transcriptomic risk signature is detected in a subject, which in some cases involves detecting a level of histone cluster 1 H1 family member A (HIST1H1A). In some cases, the transcriptomic risk signature is an upregulation of HIST1H1A, as compared to a normal (e.g, non-diseased individual), or an individual with a less severe form of CD, such as CD1. In some cases, the transcriptomic risk signature is detected by detecting a level of gene expression product expressed from HIST1H1A. In some cases, the transcriptomic risk signature is detected by detecting a presence of a SNP associated with the upregulation of HIST1H1A. In some cases, the SNP is a “G” at rs16891235, which is provided in SEQ ID NO: 236. In some embodiments, a single SNP is detected In some embodiments, more than one SNP is detected In some embodiments, methods further comprise administering to the subject a therapeutically effective amount of a therapeutic agent disclosed herein (e.g., agonist of ADYC, inhibitor of PDE4).

[0879] Methods disclosed herein comprise characterizing an IBD as a severe form of CD characteristic of CD3, provided that a transcriptomic risk signature is detected in a subject, which in some cases involves detecting a level of Aldehyde Dehydrogenase 2 Family Member (ALDH2). In some cases, the transcriptomic risk signature is a downregulation of ALDH2, as compared to anormal (e.g, non-diseased individual), or an individual with a less severe form of CD, such as CD1. In some cases, the transcriptomic risk signature is detected by detecting a level of gene expression product expressed from ALDH2. In some cases, the transcriptomic risk signature is detected by detecting a presence of a SNP associated with the downregulation of ALDH2. In some cases, the SNP is a “C” at rs7296651, which is provided in SEQ ID NO: 412. In some embodiments, a single SNP is detected In some embodiments, more than one SNP is detected. In some embodiments, methods further comprise administering to the subject a therapeutically effective amount of a therapeutic agent disclosed herein (e.g., agonist of ADYC, inhibitor of PDE4).

[0880] Methods disclosed herein comprise characterizing an IBD as a severe form of CD characteristic of CD3, provided that a transcriptomic risk signature is detected in a subject, which in some cases involves detecting a level of BRD2, which is predictive of a risk of developing a severe form of CD characteristic of CD3. In some cases, the transcriptomic risk signature is a downregulation of BRD2, as compared to a normal (e.g., non-diseased individual), or an individual with a less severe form of CD, such as CD1. In some cases, the transcriptomic risk signature is detected by detecting a level of gene expression product expressed from BRD2. In some cases, the transcriptomic risk signature is detected by detecting a presence of a SNP associated with the downregulation of BRD2. In some cases, the SNP is at is rs516535 and comprises an “A” allele, which is provided in SEQ ID NO: 320. In some embodiments, a single SNP is detected In some embodiments, more than one SNP is detected In some embodiments, methods further comprise administering to the subject a therapeutically effective amount of a therapeutic agent disclosed herein (e.g., agonist of ADYC, inhibitor of PDE4).

[0881] Methods disclosed herein comprise characterizing an IBD as a severe form of CD characteristic of CD3, provided that a transcriptomic risk signature is detected in a subject, which in some cases involves detecting a level of HLA-DQA2, which is predictive of a risk of developing a severe form of CD characteristic of CD3. In some cases, the transcriptomic risk signature is a downregulation or upregulation of HLA-DQA2, as compared to a normal (e.g., non-diseased individual), or an individual with a less severe form of CD, such as CD1. In some cases, the transcriptomic risk signature is detected by detecting a level of gene expression product expressed from HLA-DQA2. In some cases, the transcriptomic risk signature is detected by detecting a presence of a SNP associated with the downregulation or the upregulation of AHLA-DQA2. In some cases, the SNP is at rs9276427 and comprises an “A” allele, which is provided in SEQ ID NO: 351. In some embodiments, a single SNP is detected. In some embodiments, more than one SNP is detected In some embodiments, methods further comprise administering to the subject a therapeutically effective amount of a therapeutic agent disclosed herein (e.g., agonist of ADYC, inhibitor of PDE4).

[0882] Methods disclosed herein comprise characterizing an IBD as a severe form of CD characteristic of CD3, provided that a transcriptomic risk signature is detected in a subject, which in some cases involves detecting a level of KIF21B, which is predictive of a risk of developing a severe form of CD characteristic of CD3. In some cases, the transcriptomic risk signature is an upregulation of KIF21B, as compared to a normal (e.g., non-diseased individual), or an individual with a less severe form of CD, such as CD1. In some cases, the transcriptomic risk signature is detected by detecting a level of gene expression product expressed from KIF21B. In some cases, the transcriptomic risk signature is detected by detecting a presence of a SNP associated with the upregulation of KIF21B. In some cases, the SNP is at rs296564 and comprises an “A” allele, which is provided in SEQ ID NO: 323. In some cases, the SNP is at rs296569 and comprises a “A” allele, which is provided in SEQ ID NO: 331. In some cases, the SNP is and comprises an “A” allele, which is provided in SEQ ID NO: 332. In some cases, the SNP is at rs296567 and comprises a “G” allele, which is provided in SEQ ID NO: 333. In some cases, the SNP is at rs296561 and comprises a “G” allele, which is provided in SEQ ID NO: 334. In some cases, the SNP is at rs72749142 and comprises a “G” allele, which is provided in SEQ ID NO: 389. In some embodiments, a single SNP is detected In some embodiments, more than one SNP is detected In some embodiments, methods further comprise administering to the subject a therapeutically effective amount of a therapeutic agent disclosed herein (e.g., agonist of ADYC, inhibitor of PDE4).

[0883] Methods disclosed herein comprise characterizing an IBD as a severe form of CD characteristic of CD3, provided that a transcriptomic risk signature is detected in a subject, which in some cases involves detecting a level of PCDH7, which is predictive of a risk of developing a severe form of CD characteristic of CD3. In some cases, the transcriptomic risk signature is a downregulation of PCDH7, as compared to a normal (e.g, non-diseased individual), or an individual with a less severe form of CD, such as CD1. In some cases, the transcriptomic risk signature is detected by detecting a level of gene expression product expressed from PCDH7. In some cases, the transcriptomic risk signature is detected by detecting a presence of a SNP associated with the downregulation of PCDH7. In some cases, the SNP is at rs9291547 and comprises an “A” allele, which is provided in SEQ ID NO: 255. In some embodiments, a single SNP is detected In some embodiments, more than one SNP is detected In some embodiments, methods further comprise administering to the subject a therapeutically effective amount of a therapeutic agent disclosed herein (e.g., agonist of ADYC, inhibitor of PDE4).

[0884] Methods disclosed herein comprise characterizing an IBD as a severe form of CD characteristic of CD3, provided that a transcriptomic risk signature is detected in a subject, which in some cases involves detecting a level of ANK3, which is predictive of a risk of developing a severe form of CD characteristic of CD3. In some cases, the transcriptomic risk signature is a downregulation of ANK3, as compared to a normal (e.g, non-diseased individual), or an individual with a less severe form of CD, such as CD1. In some cases, the transcriptomic risk signature is detected by detecting a level of gene expression product expressed from ANK3. In some cases, the transcriptomic risk signature is detected by detecting a presence of a SNP associated with the downregulation of ANK In some cases, the SNP is at rs10761532 and comprises an “A” allele, which is provided in SEQ ID NO: 194. In some cases, the SNP is at rs10821813 and comprises an “A” allele, which is provided in SEQ ID NO: 195. In some cases, the SNP is at rs1561852 and comprises a “C” allele, which is provided in SEQ ID NO: 196. In some cases, the SNP is at rs10994464 and comprises an “A” allele, which is provided in SEQ ID NO: 204. In some cases, the SNP is at rs993402 and comprises a “G” allele, which is provided in SEQ ID NO: 205. In some cases, the SNP is at rs10994467 and comprises an “A” allele, which is provided in SEQ ID NO: 206. In some cases, the SNP is at rs10821822 and comprises an “A” allele, which is provided in SEQ ID NO: 207. In some cases, the SNP is at rs1837949 and comprises a “G” allele, which is provided in SEQ ID NO: 208. In some cases, the SNP is at rs35597961 and comprises a “C” allele, which is provided in SEQ ID NO: 209. In some cases, the SNP is at rs10821830 and comprises a “G” allele, which is provided in SEQ ID NO: 210. In some cases, the SNP is at rs975262 and comprises an “A” allele, which is provided in SEQ ID NO: 211. In some cases, the SNP is at rs973067 and comprises an “A” allele, which is provided in SEQ ID NO: 212. In some cases, the SNP is at rs10509139 and comprises a “G” allele, which is provided in SEQ ID NO: 213. In some cases, the SNP is at rs1442539 and comprises an “A” allele, which is provided in SEQ ID NO: 214. In some cases, the SNP is at rs2197155 and comprises an “A” allele, which is provided in SEQ ID NO: 215. In some cases, the SNP is at rs7919914 and comprises a “G” allele, which is provided in SEQ ID NO: 216. In some cases, the SNP is at rs10994476 and comprises a “G” allele, which is provided in SEQ ID NO: 275. In some cases, the SNP is at rs35471473 and comprises an “A” allele, which is provided in SEQ ID NO: 243. In some cases, the SNP is at rs12785023 and comprises a “G” allele, which is provided in SEQ ID NO: 244. In some cases, the SNP is at rs12783716 and comprises a “G” allele, which is provided in SEQ ID NO: 245. In some cases, the SNP is at rs10821821 and comprises a “G” allele, which is provided in SEQ ID NO: 246. In some cases, the SNP is at rs10994441 and comprises a “G” allele, which is provided in SEQ ID NO: 284. In some cases, the SNP is at rs10994442 and comprises a “C” allele, which is provided in SEQ ID NO: 285. In some cases, the SNP is at rs10821814 and comprises a “T” allele, which is provided in SEQ ID NO: 286. In some cases, the SNP is at rs10994465 and comprises an “A” allele, which is provided in SEQ ID NO: 287. In some cases, the SNP is at rs12218617 and comprises a “T” allele, which is provided in SEQ ID NO: 288. In some cases, the SNP is at rs10509138 and comprises a “C” allele, which is provided in SEQ ID NO: 289. In some cases, the SNP is at rs61854518 and comprises an “A” allele, which is provided in SEQ ID NO: 290. In some cases, the SNP is at rs10821699 and comprises a “G” allele, which is provided in SEQ ID NO: 345. In some cases, the SNP is at rs7919274 and comprises a “G” allele, which is provided in SEQ ID NO: 352. In some cases, the SNP is at rs10761552 and comprises an “A” allele, which is provided in SEQ ID NO: 368. In some cases, the SNP is at rs17037425 and comprises a “G” allele, which is provided in SEQ ID NO: 369. In some cases, the SNP is at rs2893861 and comprises an “A” allele, which is provided in SEQ ID NO: 370. In some cases, the SNP is at rs1993939 and comprises a “C” allele, which is provided in SEQ ID NO: 371. In some cases, the SNP is at rs10821833 and comprises a “G” allele, which is provided in SEQ ID NO: 372. In some cases, the SNP is at rs1904418 and comprises a “G” allele, which is provided in SEQ ID NO: 373. In some cases, the SNP is at rs16915196 and comprises a “G” allele, which is provided in SEQ ID NO: 432. In some cases, the SNP is at rs61853514 and comprises an “A” allele, which is provided in SEQ ID NO: 433. In some cases, the SNP is at rs10994430 and comprises an “A” allele, which is provided in SEQ ID NO: 434. In some cases, the SNP is at rs16915231 and comprises an “A” allele, which is provided in SEQ ID NO: 435. In some cases, the SNP is at rs2028564 and comprises a “G” allele, which is provided in SEQ ID NO: 436. In some embodiments, a single SNP is detected In some embodiments, more than one SNP is detected. In some embodiments, methods further comprise administering to the subject a therapeutically effective amount of a therapeutic agent disclosed herein (e.g., agonist of ADYC, inhibitor of PDE4).

[0885] Methods disclosed herein comprise characterizing an IBD as a severe form of CD characteristic of CD3, provided that a transcriptomic risk signature is detected in a subject, which in some cases involves detecting a level of TRIM38, which is predictive of a risk of developing a severe form of CD characteristic of CD3. In some cases, the transcriptomic risk signature is a downregulation of TRIM38, as compared to anormal (e.g., non-diseased individual), or an individual with a less severe form of CD, such as CD1. In some cases, the transcriptomic risk signature is detected by detecting a level of gene expression product expressed from TRIM38. In some cases, the transcriptomic risk signature is detected by detecting a presence of a SNP associated with the downregulation of TRIM38. In some cases, the SNP is at rs13196552 and comprises a “G” allele, which is provided in SEQ ID NO: 237. In some cases, the SNP is at rs17587597 and comprises an “A” allele, which is provided in SEQ ID NO: 282. In some cases, the SNP is at rs17587226 and comprises an “A” allele, which is provided in SEQ ID NO: 301. In some embodiments, a single SNP is detected. In some embodiments, more than one SNP is detected In some embodiments, methods further comprise administering to the subject a therapeutically effective amount of a therapeutic agent disclosed herein (e.g., agonist of ADYC, inhibitor of PDE4).

[0886] Methods disclosed herein comprise characterizing an IBD as a severe form of CD characteristic of CD3, provided that a transcriptomic risk signature is detected in a subject, which in some cases involves detecting a level of CYP4V2, which is predictive of a risk of developing a severe form of CD characteristic of CD3. In some cases, the transcriptomic risk signature is a downregulation of CYP4V2, as compared to a normal (e.g., non-diseased individual), or an individual with a less severe form of CD, such as CD1. In some cases, the transcriptomic risk signature is detected by detecting a level of gene expression product expressed from CYP4V2. In some cases, the transcriptomic risk signature is detected by detecting a presence of a SNP associated with the downregulation of CYP4V2. In some cases, the SNP is at rs2276917 and comprises an “A” allele, which is provided in SEQ ID NO: 200. In some cases, the SNP is at rs10013653 and comprises an “A” allele, which is provided in SEQ ID NO: 312.

[0887] Methods disclosed herein comprise characterizing an IBD as a severe form of CD characteristic of CD3, provided that a transcriptomic risk signature is detected in a subject, which in some cases involves detecting a level of VAMP3, which is predictive of a risk of developing a severe form of CD characteristic of CD3. In some cases, the transcriptomic risk signature is a downregulation of VAMP3, as compared to a normal (e.g, non-diseased individual), or an individual with a less severe form of CD, such as CD1. In some cases, the transcriptomic risk signature is detected by detecting a level of gene expression product expressed from VAMP3. In some cases, the transcriptomic risk signature is detected by detecting a presence of a SNP associated with the downregulation of VAMP3. In some cases, the SNP is at rs11582799 and comprises an “A” allele, which is provided in SEQ ID NO: 222. In some cases, the SNP is at rs111692854 and comprises an “A” allele, which is provided in SEQ ID NO: 223. In some cases, the SNP is at rs72632053 and comprises an “A” allele, which is provided in SEQ ID NO: 224. In some embodiments, a single SNP is detected. In some embodiments, more than one SNP is detected In some embodiments, methods further comprise administering to the subject a therapeutically effective amount of a therapeutic agent disclosed herein (e.g., agonist of ADYC, inhibitor of PDE4).

### G. Methods of Detection

[0888] Disclosed herein, in some embodiments, are methods of detecting a presence, absence, or level, of a genotype or biomarker in a sample obtained from a subject. In some instances, the methods of detection disclosed herein are useful for the diagnosis, prognosis, monitoring of disease progression, selection for treatment, monitoring of treatment, and/or treatment of inflammatory bowel disease (e.g., Crohn's disease, ulcerative colitis, and the like) disclosed herein.

[0889] In some embodiments, methods of detecting a presence, absence, or level of a genotype or biomarker in the sample obtained from the subject involve detecting a nucleic acid sequence. In some cases, the nucleic acid sequence comprises deoxyribonucleic acid (DNA). In some instances, the nucleic acid sequence comprises a denatured DNA molecule or fragment thereof. In some instances, the nucleic acid sequence comprises DNA selected from: genomic DNA, viral DNA, mitochondrial DNA, plasmid DNA, amplified DNA, circular DNA, circulating DNA, cell-free DNA, or exosomal DNA. In some instances, the DNA is single-stranded DNA (ssDNA), double-stranded DNA, denaturing double-stranded DNA, synthetic DNA, and combinations thereof. The circular DNA may be cleaved or fragmented In some instances, the nucleic acid sequence comprises ribonucleic acid (RNA). In some instances, the nucleic acid sequence comprises fragmented RNA. In some instances, the nucleic acid sequence comprises partially degraded RNA In some instances, the nucleic acid sequence comprises a microRNA or portion thereof. In some instances, the nucleic acid sequence comprises an RNA molecule or a fragmented RNA molecule (RNA fragments) selected from: a microRNA (miRNA), a pre-miRNA, a pri-miRNA, a mRNA, a pre-mRNA, a viral RNA, a viroid RNA, a virusoid RNA, circular RNA (circRNA), a ribosomal RNA (rRNA), a transfer RNA (tRNA), a pre-tRNA, a long non-coding RNA (lncRNA), a small nudear RNA (snRNA), a circulating RNA, a cell-free RNA, an exosomal RNA, a vector-expressed RNA, an RNA transcript, a synthetic RNA, and combinations thereof.

[0890] Disclosed herein, in some embodiments, the genotype or biomarker is detected by subjecting a sample obtained from the subject to a nucleic acid-based detection assay. In some instances, the nucleic acid-based detection assay comprises quantitative polymerase chain reaction (qPCR), gel electrophoresis (including for e.g, Northern or Southern blot), immunochemistry, in situ hybridization such as fluorescent in situ hybridization (FISH), cytochemistry, or sequencing. In some embodiments, the sequencing technique comprises next generation sequencing. In some embodiments, the methods involve a hybridization assay such as fluorogenic qPCR (e.g, TaqMan™, SYBR green, SYBR green I, SYBR green II, SYBR gold, ethidium bromide, methylene blue, Pyronin Y, DAPI, acridine orange, Blue View or phycoerythrin), which involves a nucleic acid amplification reaction with a specific primer pair, and hybridization of the amplified nucleic acid probes comprising a detectable moiety or molecule that is specific to a target nucleic acid sequence. In some instances, a number of amplification cycles for detecting a target nucleic acid in a qPCR assay is about 5 to about 30 cycles. In some instances, the number of amplification cycles for detecting a target nucleic acid is at least about 5 cycles. In some instances, the number of amplification cycles for detecting a target nucleic acid is at most about 30 cycles. In some instances, the number of amplification cycles for detecting a target nucleic acid is about 5 to about 10, about 5 to about 15, about 5 to about 20, about 5 to about 25, about 5 to about 30, about 10 to about 15, about 10 to about 20, about 10 to about 25, about 10 to about 30, about 15 to about 20, about 15 to about 25, about 15 to about 30, about 20 to about 25, about 20 to about 30, or about 25 to about 30 cycles. For TaqMan™ methods, the probe may be a hydrolysable probe comprising a fluorophore and quencher that is hydrolyzed by DNA polymerase when hybridized to a target nucleic acid. In some cases, the presence of a target nucleic acid is determined when the number of amplification cycles to reach a threshold value is less than 30, 29, 28, 27, 26, 25, 24, 23, 22, 21, or 20 cycles. In some instances, hybridization may occur at standard hybridization temperatures, e.g., between about 35° C. and about 65° C. in a standard PCR buffer.

[0891] An additional exemplary nucleic acid-based detection assay comprises the use of nucleic acid probes conjugated or otherwise immobilized on a bead, multi-well plate, or other substrate, wherein the nucleic acid probes are configured to hybridize with a target nucleic acid sequence. In some instances, the nucleic acid probe is specific to one or more genetic variants disclosed herein is used. In some instances, the nucleic acid probe specific to a SNP or SNV comprises a nucleic acid probe sequence sufficiently complementary to a risk or protective allele of interest, such that hybridization is specific to the risk or protective allele. In some instances, the nucleic acid probe specific to an indel comprises a nucleic acid probe sequence sufficiently complementary to an insertion of a nucleobase within a polynucleotide sequence flanking the insertion, such that hybridization is specific to the indel. In some instances, the nucleic acid probe specific to an indel comprises a probe sequence sufficiently complementary to a polynucleotide sequence flanking a deletion of a nucleobase within the polynucleotide sequence, such that hybridization is specific to the indel. In some instances, the nucleic acid probe specific to a biomarker comprises a nucleic acid probe sequence sufficiently complementary to the polynucleotide sequence of the biomarker. In some instances, the biomarker comprises a transcribed polynucleotide sequence (e.g., RNA, cDNA). In some embodiments, the nucleic acid probe can be, for example, a full-length cDNA, or a portion thereof, such as an oligonucleotide of at least about 7, 8, 9, 10, 11, 12, 13, 14, 15, 20, 25, 30, 35, 40, 45, or 50 nucleotides in length and sufficient to specifically hybridize under standard hybridization conditions to the target nucleic acid sequence. In some embodiments, the target nucleic acid sequence is immobilized on a solid surface and contacted with a probe, for example by running the isolated target nucleic acid sequence on an agarose gel and transferring the target nucleic acid sequence from the gel to a membrane, such as nitrocellulose. In some embodiments, the probe(s) are immobilized on a solid surface, for example, in an Affymetrix gene chip array, and the probe(s) are contacted with the target nucleic acid sequence.

[0892] The present disclosure provides exemplary probes that are hybridizable to a target nucleic acid sequence within SEQ ID NOS: 1-439, including the risk allele at the position indicated with the non-nucleobase letter (e.g, “r”. In some embodiments, the nucleic acid probe comprises sequences complementary to the nucleic acid sequence of SEQ ID NOS: 1-439, including the risk allele at the position indicated with the non-nucleobase letter. Alternatively, the nucleic acid probe is specific to a gene, or part of a gene, of Table 3 or Table 4. In some instances, the biomarker is provided in Table 6.

[0893] In an aspect, provided herein, are methods comprising: a) providing a sample obtained from a subject with an inflammatory disease; b) assaying to detect in the sample obtained from the subject a presence of a risk genotype a transcriptomic risk signature; and c) detecting the presence of the risk genotype. In some embodiments, the risk genotype comprises one or more polymorphisms provided in Table 2, and assaying comprises contacting a nucleic acid probe to a sample obtained from the subject, the nucleic acid probe capable of hybridizing to at least about 10 contiguous nucleotides of a nucleic acid sequence provided in any one of SEQ ID NOS: 1-439, or reverse complement thereof, the 10 contiguous nucleotides comprising a risk allele (see Table 2) at the [bracketed] position within SEQ ID NOS: 1-439. An exemplary assay to detect a risk genotype is qPCR, and sequencing methodologies. In some instances, the assaying is performed under standard hybridization conditions. The standard hybridization conditions may comprise an annealing temperature between about 30° C. and about 65° C.

[0894] In an aspect, provided herein, the detection of the polymorphism involves amplification of the subject's nucleic acid by the polymerase chain reaction (PCR). In some embodiments, the PCR assay involves use of a pair of primers capable of amplifying at least about 10 contiguous nucleobases within a nucleic acid sequence provided in SEQ ID NOS: 1-439 comprising a risk allele at the [bracketed] position in any one of SEQ ID NOS: 1-439, thereby amplifying a risk genotype provided in Table 2. In fluorogenic quantitative PCR, quantitation is based on amount of fluorescence signals (TaqMan and SYBR green). In some embodiments, the nucleic acid probe is conjugated to a detectable molecule. The detectable molecule may be a fluorophore. The nucleic acid probe may also be conjugated to a quencher.

[0895] In some embodiments, the term “probe” with regards to nucleic acids, refers to any nucleic acid molecule that is capable of selectively binding to a specifically intended target nucleic acid sequence. In some instances, probes are specifically designed to be labeled, for example, with a radioactive label, a fluorescent label, an enzyme, a chemiluminescent tag, a colorimetric tag, or other labels or tags that are known in the art. In some instances, the fluorescent label comprises a fluorophore. In some instances, the fluorophore is an aromatic or heteroaromatic compound In some instances, the fluorophore is a pyrene, anthracene, naphthalene, acridine, stilbene, benzoxaazole, indole, benzindole, oxazole, thiazole, benzothiazole, canine, carbocyanine, salicylate, anthranilate, xanthenes dye, coumarin. Exemplary xanthene dyes include, e.g., fluorescein and rhodamine dyes. Fluorescein and rhodamine dyes include, but are not limited to 6-carboxyfluorescein (FAM), 2′7′-dimethoxy-4′5′-dichloro-6-carboxyfluorescein (JOE), tetrachlorofluorescein (TET), 6-carboxyrhodamine (R6G), N,N,N; N′-tetramethyl-6-carboxyrhodamine (TAMRA), 6-carboxy-X-rhodamine (ROX). Suitable fluorescent probes also include the naphthylamine dyes that have an amino group in the alpha or beta position. For example, naphthylamino compounds include 1-dimethylaminonaphthyl-5-sulfonate, 1-anilino-8-naphthalene sulfonate and 2-p-toluidinyl-6-naphthalene sulfonate, 5-(2′-aminoethyl)aminonaphthalene-1-sulfonic acid (EDANS). Exemplary coumarins include, e.g., 3-phenyl-7-isocyanatocoumarin; acridines, such as 9-isothiocyanatoacridine and acridine orange; N-(p-(2-benzoxazolyl)phenyl) maleimide; cyanines, such as, e.g., indodicarbocyanine 3 (Cy3), indodicarbocyanine 5 (Cy5), indodicarbocyanine 5.5 (Cy5.5), 3-(-carboxy-pentyl)-3′-ethyl-5,5′-dimethyloxacarbocyanine (CyA); 1H, 5H, 11H, 15H-Xantheno[2,3, 4-ij: 5,6, 7-i′j′]diquinolizin-18-ium, 9-[2 (or 4)-[[[6-[2,5-dioxo-1-pyrrolidinyl)oxy]-6-oxohexyl]amino]sulfonyl]-4 (or 2)-sulfophenyl]-2,3,6,7,12,13,16,17-octahydro-inner salt (TR or Texas Red); or BODIPY™ dyes. In some cases, the probe comprises FAM as the dye label.

[0896] Disclosed herein, in some embodiments, a genotype or biomarker is detected by subjecting a sample obtained from the subject to a nucleic acid amplification assay. In some instances, the amplification assay comprises polymerase chain reaction (PCR), qPCR, self-sustained sequence replication, transcriptional amplification system, Q-Beta Replicase, rolling circle replication, or any suitable other nucleic acid amplification technique. A suitable nucleic acid amplification technique is configured to amplify a region of a nucleic acid sequence comprising one or more genetic risk variants disclosed herein. In some instances, the amplification assays requires primers. The nucleic acid sequence for the genetic risk variants and/or genes known or provided herein is sufficient to enable one of skill in the art to select primers to amplify any portion of the gene or genetic variants. A DNA sample suitable as a primer may be obtained, e.g., by polymerase chain reaction (PCR) amplification of genomic DNA, fragments of genomic DNA, fragments of genomic DNA ligated to adaptor sequences or cloned sequences. A person of skill in the art would utilize computer programs to design of primers with the desired specificity and optimal amplification properties, such as Oligo version 7.0 (National Biosciences). Controlled robotic systems are useful for isolating and amplifying nucleic acids and can be used.

[0897] In some embodiments, detecting the biomarker or genotype of the subject comprises sequencing genetic material obtained from a biological sample from the subject. Sequencing can be performed with any appropriate sequencing technology, including but not limited to single-molecule real-time (SMRT) sequencing, Polony sequencing, sequencing by ligation, reversible terminator sequencing, proton detection sequencing, ion semiconductor sequencing, nanopore sequencing, electronic sequencing, pyrosequencing, Maxam-Gilbert sequencing, chain termination (e.g., Sanger) sequencing, +S sequencing, or sequencing by synthesis. Sequencing methods also include next-generation sequencing, e.g., modern sequencing technologies such as Illumina sequencing (e.g., Solexa), Roche 454 sequencing, Ion torrent sequencing, and SOLiD sequencing. In some cases, next-generation sequencing involves high-throughput sequencing methods. Additional sequencing methods available to one of skill in the art may also be employed.

[0898] In some instances, a number of nucleotides that are sequenced are at least 5, 10, 15, 20, 25, 30, 35, 40, 45, 50, 100, 150, 200, 300, 400, 500, 2000, 4000, 6000, 8000, 10000, 20000, 50000, 100000, or more than 100000 nucleotides. In some instances, the number of nucleotides sequenced is in a range of about 1 to about 100000 nucleotides, about 1 to about 10000 nucleotides, about 1 to about 1000 nucleotides, about 1 to about 500 nucleotides, about 1 to about 300 nucleotides, about 1 to about 200 nucleotides, about 1 to about 100 nucleotides, about 5 to about 100000 nucleotides, about 5 to about 10000 nucleotides, about 5 to about 1000 nucleotides, about 5 to about 500 nucleotides, about 5 to about 300 nucleotides, about 5 to about 200 nucleotides, about 5 to about 100 nucleotides, about 10 to about 100000 nucleotides, about 10 to about 10000 nucleotides, about 10 to about 1000 nucleotides, about 10 to about 500 nucleotides, about 10 to about 300 nucleotides, about 10 to about 200 nucleotides, about 10 to about 100 nucleotides, about 20 to about 100000 nucleotides, about 20 to about 10000 nucleotides, about 20 to about 1000 nucleotides, about 20 to about 500 nucleotides, about 20 to about 300 nucleotides, about 20 to about 200 nucleotides, about 20 to about 100 nucleotides, about 30 to about 100000 nucleotides, about 30 to about 10000 nucleotides, about 30 to about 1000 nucleotides, about 30 to about 500 nucleotides, about 30 to about 300 nucleotides, about 30 to about 200 nucleotides, about 30 to about 100 nucleotides, about 50 to about 100000 nucleotides, about 50 to about 10000 nucleotides, about 50 to about 1000 nucleotides, about 50 to about 500 nucleotides, about 50 to about 300 nucleotides, about 50 to about 200 nucleotides, or about 50 to about 100 nucleotides.

[0899] Disclosed herein, in some embodiments, are methods for detecting a transcriptomic risk signature or transcriptomic risk profile in a sample obtained from the subject. In some embodiments, the presence, level, or activity of two or more biomarkers in a sample is determined by detecting a transcribed or reverse transcribed polynucleotide, or portion thereof (e.g., mRNA, or cDNA), of a target gene making up the transcriptomic risk signature or transcriptomic risk profile. Any suitable method of detecting a biomarker, such as those disclosed herein, may be utilized to detect a transcriptomic risk signature or transcriptomic risk profile, such as those disclosed herein. A transcriptomic risk signature or transcriptomic risk profile can also be detected at the protein level, using a detection reagent that detects the protein product encoded by the mRNA of the biomarker, directly or indirectly, such the detection reagents disclosed herein.

[0900] In an aspect, provided herein, are methods comprising: a) providing a sample obtained from a subject with an inflammatory disease; b) assaying to detect in the sample obtained from the subject a presence of a transcriptomic risk signature; and c) detecting the presence of the transcriptomic risk signature. In some embodiments, the transcriptomic risk signature comprises a level of expression of two or more genes from Table 3 or 4. In some cases, the transcriptomic risk signature comprises a level of expression of one or more of protein tyrosine phosphatase, non-receptor type 11 (PTPN11), ribosomal protein L30 (RPL30), X-C motif chemokine receptor 1 (XCR1), HNF1 homeobox A (HNF1), ribosomal protein L3 (RPL3), cholinergic receptor muscarinic 3 (CHRM3), DLC1 Rho GTPase activating protein (DLC1), apolipoprotein B (APOB), ribosomal protein L6 (RPL6), glutamate metabotropic receptor 4 (GRM4), p21 (RAC1) activated kinase 2 (PAK2), ribosomal protein L18 (RPL18), phosphodiesterase 4C (PDE4C), protein kinase C alpha (PRKCA), protein phosphatase 2 catalytic subunit alpha (PPP2CA), phosphatidylinositol-4-phosphate 5-kinase type 1 gamma (PIP5K1C), histone cluster 1 H1 family member A (HIST1H1A), Aldehyde Dehydrogenase 2 Family Member (ALDH2), bromodomain containing 2 (BRD2), major histocompatibility complex, class II, DQ alpha 2 (HLA-DQA2), kinesin family member 21B (KIF21B), Protocadherin 7 (PCDH7), Ankyrin 3 (ANK3), Tripartite Motif Containing 38 (TRIM38), Cytochrome P450 Family 4 Subfamily V Member 2 (CYP4V2), Vesicle Associated Membrane Protein 3 (VAMP3). The mRNA and corresponding protein sequences for the above genes are listed in Table 6.

[0901] The mRNA sequence for PTPN11 is at least or about 70%, 75%, 80%, 85%, 86%, 87%, 88%, 89%, 90%, 91%, 92%, 93%, 94%, 95%, 96%, 97%, 98%, 99%, or 100% identical to SEQ ID NO: 455. The mRNA sequence for RPL30 is at least or about 70%, 75%, 80%, 85%, 86%, 87%, 88%, 89%, 90%, 91%, 92%, 93%, 94%, 95%, 96%, 97%, 98%, 99%, or 100% identical to SEQ ID NO: 464. The mRNA sequence for XCR1 is at least or about 70%, 75%, 80%, 85%, 86%, 87%, 88%, 89%, 90%, 91%, 92%, 93%, 94%, 95%, 96%, 97%, 98%, 99%, or 100% identical to SEQ ID NO: 474. The mRNA sequence for HNF1 is at least or about 70%, 75%, 80%, 85%, 86%, 87%, 88%, 89%, 90%, 91%, 92%, 93%, 94%, 95%, %%, 97%, 98%, 99%, or 100% identical to SEQ ID NO: 484. The mRNA sequence for RPL3 SEQ ID NO: 506. The mRNA sequence for CHRM3 is at least or about 70%, 75%, 80%, 85%, 86%, 87%, 88%, 89%, 90%, 91%, 92%, 93%, 94%, 95%, 96%, 97%, 98%, 99%, or 100% identical to SEQ ID NO: 466. The mRNA sequence for DLC1 is at least or about 70%, 75%, 80%, 85%, 86%, 87%, 88%, 89%, 90%, 91%, 92%, 93%, 94%, 95%, 96%, 97%, 98%, 99%, or 100% identical to SEQ ID NO: 476. The mRNA sequence for APOB is at least or about 70%, 75%, 80%, 85%, 86%, 87%, 88%, 89%, 90%, 91%, 92%, 93%, 94%, 95%, %%, 97%, 98%, 99%, or 1000% identical to SEQ ID NO: 486. The mRNA sequence for RPL6 is at least or about 70%, 75%, 80%, 85%, 86%, 87%, 88%, 89%, 90%, 91%, 92%, 93%, 94%, 95%, 96%, 97%, 98%, 99%, or 100% identical to SEQ ID NO: 458. The mRNA sequence for GRM4 is at least or about 70%, 75%, 80%, 85%, 86%, 87%, 88%, 89%, 90%, 91%, 92%, 93%, 94%, 95%, 96%, 97%, 98%, 99%, or 100% identical to SEQ ID NO: 468. The mRNA sequence for PAK2 is at least or about 70%, 75%, 80%, 85%, 86%, 87%, 88%, 89%, 90%, 91%, 92%, 93%, 94%, 95%, %%, 97%, 98%, 99%, or 100% identical to SEQ ID NO: 478. The mRNA sequence for RPL18 is at least or about 70%, 75%, 80%, 85%, 86%, 87%, 88%, 89%, 90%, 91%, 92%, 93%, 94%, 95%, %%, 97%, 98%, 99%, or 100% identical to SEQ ID NO: 460. The mRNA sequence for PDE4C is at least or about 70%, 75%, 80%, 85%, 86%, 87%, 88%, 89%, 90%, 91%, 92%, 93%, 94%, 95%, 96%, 97%, 98%, 99%, or 100% identical to SEQ ID NO: 470. The mRNA sequence for PRKCA is at least or about 70%, 75%, 80%, 85%, 86%, 87%, 88%, 89%, 90%, 91%, 92%, 93%, 94%, 95%, 96%, 97%, 98%, 99%, or 100% identical to SEQ ID NO: 480. The mRNA sequence for PPP2CA is at least or about 70%, 75%, 80%, 85%, 86%, 87%, 88%, 89%, 90%, 91%, 92%, 93%, 94%, 95%, %%, 97%, 98%, 99%, or 100% identical to SEQ ID NO: 480. The mRNA sequence for PIPSK1C is at least or about 70%, 75%, 80%, 85%, 86%, 87%, 88%, 89%, 90%, 91%, 92%, 93%, 94%, 95%, 96%, 97%, 98%, 99%, or 100% identical to SEQ ID NO: 472. The mRNA sequence for HIST1H1A is at least or about 70%, 75%, 80%, 85%, 86%, 87%, 88%, 89%, 90%, 91%, 92%, 93%, 94%, 95%, 96%, 97%, 98%, 99%, or 1000% identical to SEQ ID NO: 482. The mRNA sequence for ALDH2 is at least or about 70%, 75%, 80%, 85%, 86%, 87%, 88%, 89%, 90%, 91%, 92%, 93%, 94%, 95%, %%, 97%, 98%, 99%, or 100% identical to SEQ ID NO: 488. The mRNA sequence for BRD2 is at least or about 70%, 75%, 80%, 85%, 86%, 87%, 88%, 89%, 90%, 91%, 92%, 93%, 94%, 95%, %%, 97%, 98%, 99%, or 100% identical to SEQ ID NO: 494. The mRNA sequence for HLA-DQA2 is at least or about 70%, 75%, 80%, 85%, 86%, 87%, 88%, 89%, 90%, 91%, 92%, 93%, 94%, 95%, 96%, 97%, 98%, 99%, or 100% identical to SEQ ID NO: 496. The mRNA sequence for KIF21B is at least or about 70%, 75%, 80%, 85%, 86%, 87%, 88%, 89%, 90%, 91%, 92%, 93%, 94%, 95%, 96%, 97%, 98%, 99%, or 100% identical to SEQ ID NO: 498. The mRNA sequence for PCDH7 is at least or about 70%, 75%, 80%, 85%, 86%, 87%, 88%, 89%, 90%, 91%, 92%, 93%, 94%, 95%, 96%, 97%, 98%, 99%, or 100% identical to SEQ ID NO: 500. The mRNA sequence for ANK3 is at least or about 70%, 75%, 80%, 85%, 86%, 87%, 88%, 89%, 90%, 91%, 92%, 93%, 94%, 95%, %%, 97%, 98%, 99%, or 100% identical to SEQ ID NO: 502. The mRNA sequence for TRIM38 is at least or about 70%, 75%, 80%, 85%, 86%, 87%, 88%, 89%, 90%, 91%, 92%, 93%, 94%, 95%, 96%, 97%, 98%, 99%, or 100% identical to SEQ ID NO: 504. The mRNA sequence for CYP4V2 is at least or about 70%, 75%, 80%, 85%, 86%, 87%, 88%, 89%, 90%, 91%, 92%, 93%, 94%, 95%, 96%, 97%, 98%, 99%, or 100% identical to SEQ ID NO: 492. The mRNA sequence for VAMP3 in at least or about 70%, 75%, 80%, 85%, 86%, 87%, 88%, 89%, 90%, 91%, 92%, 93%, 94%, 95%, 96%, 97%, 98%, 99%, or 100% identical to SEQ ID NO: 489.

[0902] In some embodiments, a complementary DNA (cDNA) library is prepared In some embodiments, the cDNA library is sequenced using suitable sequence methodologies disclosed herein. In some embodiments, the cDNA library is labeled, a plurarity of nucleic acid probes are generated, and fixed to an immobile surface (such as a microarray). In some embodiments, the plurality of nucleic acid probes are capable of hybridizing to at least about 10 contiguous nucleotides of the two or more genes in a sample obtained from the subject. In some embodiments, detecting the presence of the transcriptomic risk signature includes detecting a high or a low level of expression of the two or more genes from Table 3, as compared to a reference level.

[0903] Disclosed herein, in some embodiments, genetic material is extracted from a sample obtained from a subject, e.g., a sample of blood or serum. In certain embodiments where nucleic acids are extracted, the nucleic acids are extracted using any technique that does not interfere with subsequent analysis. In certain embodiments, this technique uses alcohol precipitation using ethanol, methanol or isopropyl alcohol. In certain embodiments, this technique uses phenol, chloroform, or any combination thereof. In certain embodiments, this technique uses cesium chloride. In certain embodiments, this technique uses sodium, potassium or ammonium acetate or any other salt commonly used to precipitate DNA In certain embodiments, this technique utilizes a column or resin based nucleic acid purification scheme such as those commonly sold commercially, one non-limiting example would be the GenElute Bacterial Genomic DNA Kit available from Sigma Aldrich. In certain embodiments, after extraction the nucleic acid is stored in water, Tris buffer, or Tris-EDTA buffer before subsequent analysis. In an exemplary embodiment, the nucleic acid material is extracted in water. In some cases, extraction does not comprise nucleic acid purification. In certain embodiments, RNA may be extracted from cells using RNA extraction techniques including, for example, using acid phenol/guanidine isothiocyanate extraction (RNAzol B; Biogenesis), RNeasy RNA preparation kits (Qiagen) or PAXgene (PreAnalytix, Switzerland).

[0904] In some embodiments, methods of detecting a presence, absence, or level of a target protein (e.g., biomarker) in the sample obtained from the subject involve detecting protein activity or expression. A target protein may be detected by use of an antibody-based assay, where an antibody specific to the target protein is utilized. In some embodiments, antibody-based detection methods utilize an antibody that binds to any region of target protein. An exemplary method of analysis comprises performing an enzyme-linked immunosorbent assay (ELISA). The ELISA assay may be a sandwich ELISA or a direct ELISA. Another exemplary method of analysis comprises a single molecule array, e.g, Simoa. Other exemplary methods of detection include immunohistochemistry and lateral flow assay. Additional exemplary methods for detecting target protein include, but are not limited to, gel electrophoresis, capillary electrophoresis, high performance liquid chromatography (HPLC), thin layer chromatography (TLC), hyperdiffusion chromatography, and the like, or various immunological methods such as fluid or gel precipitation reactions, immunodiffusion (single or double), immunoelectrophoresis, radioimmunoassay (RIA), immunofluorescent assays, and Western blotting. In some embodiments, antibodies, or antibody fragments, are used in methods such as Western blots or immunofluorescence techniques to detect the expressed proteins. The antibody or protein can be immobilized on a solid support for Western blots and immunofluorescence techniques. Suitable solid phase supports or carriers include any support capable of binding an antigen or an antibody. Exemplary supports or carriers include glass, polystyrene, polypropylene, polyethylene, dextran, nylon, amylases, natural and modified celluloses, polyacrylamides, gabbros, and magnetite.

[0905] In some cases, a target protein may be detected by detecting binding between the target protein and a binding partner of the target protein. In some cases, the target protein comprises phosphodiesterase 4C (PDE4C), adenylate cyclase 7 (ADCY7), intercellular adhesion molecule 3 (ICAM3), interleukin 18 binding protein (IL18BP), and oncostatin-M-specific receptor subunit (OSMR), or SMAD Family Member 3 (SMAD3). In some cases, the target protein is one or more of tyrosine phosphatase, non-receptor type 11 (PTPN11), ribosomal protein (RL30), X-C motif chemokine receptor 1 (XCR1), HNF1 homeobox A (HNF1A), ribosomal protein L3 (RPL3), cholinergic receptor muscarinic 3 (CHRM3), DLC1 Rho GTPase activating protein (DLC1), apolipoprotein B (APOB), ribosomal protein L6 (RPL6), glutamate metabotropic receptor 4 (GRM4), p21 (RAC1) activated kinase 2 (PAK2), ribosomal protein L18 (RPL18), phosphodiesterase 4C (PDE4C), protein kinase C alpha (PRKCA), protein phosphatase 2 catalytic subunit alpha (PPP2CA), phosphatidylinositol-4-phosphate 5-kinase type 1 gamma (PIP5K1C), histone cluster 1 H1 family member A (HIST1H1A), Aldehyde Dehydrogenase 2 Family Member (ALDH2), bromodomain containing 2 (BRD2), major histocompatibility complex, class II, DQ alpha 2 (HLA-DQA2), kinesin family member 21B (KIF21B), Protocadherin 7 (PCDH7), Ankyrin 3 (ANK3), Tripartite Motif Containing 38 (TRIM38), Cytochrome P450 Family 4 Subfamily V Member 2 (CYP4V2), Vesicle Associated Membrane Protein 3 (VAMP3). In some instances, the target protein is listed in Table 6.

[0906] The protein sequence for PTPN11 is at least or about 70%, 75%, 80%, 85%, 86%, 87%, 88%, 89%, 90%, 91%, 92%, 93%, 94%, 95%, 96%, 97%, 98%, 99%, or 100% identical to SEQ ID NO: 454. The protein sequence for RPL30 is at least or about 70%, 75%, 80%, 85%, 86%, 87%, 88%, 89%, 90%, 91%, 92%, 93%, 94%, 95%, 96%, 97%, 98%, 99%, or 100% identical to SEQ ID NO: 463. The protein sequence for XCR1 is at least or about 70%, 75%, 80%, 85%, 86%, 87%, 88%, 89%, 90%, 91%, 92%, 93%, 94%, 95%, 96%, 97%, 98%, 99%, or 100% identical to SEQ ID NO: 473. The protein sequence for HNF1A is at least or about 70%, 75%, 80%, 85%, 86%, 87%, 88%, 89%, 90%, 91%, 92%, 93%, 94%, 95%, 96%, 97%, 98%, 99%, or 100% identical to SEQ ID NO: 483. The protein sequence for RPL3 SEQ ID NO: 456. The protein sequence for CHRM3 is at least or about 70%, 75%, 80%, 85%, 86%, 87%, 88%, 89%, 90%, 91%, 92%, 93%, 94%, 95%, 96%, 97%, 980%, 99%, or 100% identical to SEQ ID NO: 465. The protein sequence for DLC1 is at least or about 70%, 75%, 80%, 85%, 86%, 87%, 88%, 89%, 90%, 91%, 92%, 93%, 94%, 95%, 96%, 97%, 98%, 99%, or 100% identical to SEQ ID NO: 475. The protein sequence for APOB is at least or about 70%, 75%, 80%, 85%, 86%, 87%, 88%, 89%, 90%, 91%, 92%, 93%, 94%, 95%, 96%, 97%, 98%, 99%, or 100% identical to SEQ ID NO: 485. The protein sequence for RPL6 is at least or about 700%, 75%, 80%, 85%, 86%, 87%, 88%, 89%, 90%, 91%, 92%, 93%, 94%, 95%, 96%, 97%, 98%, 99%, or 100% identical to SEQ ID NO: 457. The protein sequence for GRM4 is at least or about 70%, 75%, 80%, 85%, 86%, 87%, 88%, 89%, 90%, 91%, 92%, 93%, 94%, 95%, %%, 97%, 98%, 99%, or 100% identical to SEQ ID NO: 467. The protein sequence for PAK2 is at least or about 70%, 75%, 80%, 85%, 86%, 87%, 88%, 89%, 90%, 91%, 92%, 93%, 94%, 95%, %%, 97%, 98%, 99%, or 100% identical to SEQ ID NO: 477. The protein sequence for RPL18 is at least or about 700%, 75%, 80%, 85%, 86%, 87%, 88%, 89%, 90%, 91%, 92%, 93%, 94%, 95%, 96%, 97%, 98%, 99%, or 100% identical to SEQ ID NO: 459. The protein sequence for PDE4C is at least or about 70%, 75%, 80%, 85%, 86%, 87%, 88%, 89%, 90%, 91%, 92%, 93%, 94%, 95%, %%, 97%, 98%, 99%, or 100% identical to SEQ ID NO: 469. The protein sequence for PRKCA is at least or about 70%, 75%, 80%, 85%, 86%, 87%, 88%, 89%, 90%, 91%, 92%, 93%, 94%, 95%, 96%, 97%, 98%, 99%, or 100% identical to SEQ ID NO: 479. The protein sequence for PPP2CA is at least or about 700%, 75%, 80%, 85%, 86%, 87%, 88%, 89%, 90%, 91%, 92%, 93%, 94%, 95%, 96%, 97%, 98%, 99%, or 100% identical to SEQ ID NO: 461. The protein sequence for PIP5K1C is at least or about 70%, 75%, 80%, 85%, 86%, 87%, 88%, 89%, 90%, 91%, 92%, 93%, 94%, 95%, 96%, 97%, 98%, 99%, or 100% identical to SEQ ID NO: 471. The protein sequence for HIST1H1A is at least or about 700%, 75%, 80%, 85%, 86%, 87%, 88%, 89%, 90%, 91%, 92%, 93%, 94%, 95%, 96%, 97%, 98%, 99%, or 100% identical to SEQ ID NO: 481. The protein sequence for ALDH2 is at least or about 70%, 75%, 80%, 85%, 86%, 87%, 88%, 89%, 90%, 91%, 92%, 93%, 94%, 95%, %%, 97%, 98%, 99%, or 100% identical to SEQ ID NO: 487. The protein sequence for BRD2 is at least or about 70%, 75%, 80%, 85%, 86%, 87%, 88%, 89%, 90%, 91%, 92%, 93%, 94%, 95%, %%, 97%, 98%, 99%, or 100% identical to SEQ ID NO: 495. The protein sequence for HLA-DQA2 is at least or about 70%, 75%, 80%, 85%, 86%, 87%, 88%, 89%, 90%, 91%, 92%, 93%, 94%, 95%, 96%, 97%, 98%, 99%, or 100% identical to SEQ ID NO: 497. The protein sequence for KIF21B is at least or about 70%, 75%, 80%, 85%, 86%, 87%, 88%, 89%, 90%, 91%, 92%, 93%, 94%, 95%, 96%, 97%, 98%, 99%, or 100% identical to SEQ ID NO: 499. The protein sequence for PCDH7 is at least or about 70%, 75%, 80%, 85%, 86%, 87%, 88%, 89%, 90%, 91%, 92%, 93%, 94%, 95%, %, 96%, 97%, 98%, 99%, or 100% identical to SEQ ID NO: 501. The protein sequence for ANK3 is at least or about 70%, 75%, 80%, 85%, 86%, 87%, 88%, 89%, 90%, 91%, 92%, 93%, 94%, 95%, 96%, 97%, 98%, 99%, or 100% identical to SEQ ID NO: 503. The protein sequence for TRIM38 is at least or about 70%, 75%, 80%, 85%, 86%, 87%, 88%, 89%, 90%, 91%, 92%, 93%, 94%, 95%, 96%, 97%, 98%, 99%, or 100% identical to SEQ ID NO: 505. The protein sequence for CYP4V2 is at least or about 70%, 75%, 80%, 85%, 86%, 87%, 88%, 89%, 90%, 91%, 92%, 93%, 94%, 95%, 96%, 97%, 98%, 99%, or 100% identical to SEQ ID NO: 493. The protein sequence for VAMVP3 in at least or about 70%, 75%, 80%, 85%, 86%, 87%, 88%, 89%, 90%, 91%, 92%, 93%, 94%, 95%, 96%, 97%, 98%, 99%, or 100% identical to SEQ ID NO: 491.

[0907] Exemplary methods of analysis of protein-protein binding comprise performing an assay in vivo or in viro, or ex vivo. In some instances, the method of analysis comprises an assay such as a co-immunoprecipitation (co-IP), pull-down, crosslinking protein interaction analysis, labeled transfer protein interaction analysis, or Far-western blot analysis, FRET based assay, including, for example FRET-FLIM, a yeast two-hybrid assay, BiFC, or split luciferase assay.

[0908] The identifiers for the relevant biomarkers (RNA, protein, DNA) are provided in Table 6.

TABLE 6
Biomarkers Identifiers

| Name | Transcript ID | bp | CCDS | UniProt | RefSeq |
|---|---|---|---|---|---|
| PTPN11-001 | ENST00000351677.2 | 6101 | CCDS9163 | B3GUD3 B3GUD4 | NM_002834 |
| | | | | Q06124 | NP_002825 |
| PTPN11-002 | ENST00000392597.1 | 1876 | CCDS58280 | B3GUD3 B3GUD4 | NM_080601 |
| | | | | Q06124 | NP_542168 |
| PTPN11-004 | ENST00000530818.1 | 486 | — | — | — |
| PTPN11-003 | ENST00000531326.1 | 573 | — | — | — |
| RPL3-001 | ENST00000216146.4 | 1442 | CCDS13988 | B4DN06 B5MCW2 | NM_000967 |
| | | | | G5E9G0 P39023 | NM_001033853 |
| | | | | Q49AJ9 Q8TBW1 | NP_000958 |
| | | | | Q9BT63 Q9NY85 | NP_001029025 |
| RPL3-003 | ENST00000401609.1 | 1289 | — | B5MCW2 G5E9G0 | — |
| | | | | Q49AJ9 Q9BT63 | |
| | | | | Q9NY85 | |
| RPL3-009 | ENST00000402527.1 | 1205 | — | B5MCW2 | — |
| RPL3-012 | ENST00000453303.1 | 916 | — | H7C422 | — |
| RPL3-011 | ENST00000427905.1 | 782 | — | — | — |
| RPL3-014 | ENST00000420536.1 | 711 | — | F8WCR1 | — |
| RPL3-002 | ENST00000465618.1 | 2108 | — | — | NR_000026 |
| RPL3-016 | ENST00000471290.1 | 481 | — | — | — |
| RPL3-008 | ENST00000459859.1 | 447 | — | — | — |
| RPL3-004 | ENST00000467105.1 | 1396 | — | — | NR_000028 |
| RPL3-013 | ENST00000484615.1 | 827 | — | — | — |
| RPL3-006 | ENST00000461967.1 | 767 | — | — | — |
| RPL3-007 | ENST00000498462.1 | 669 | — | — | — |
| RPL3-010 | ENST00000460589.1 | 630 | — | — | — |
| RPL3-019 | ENST00000464182.1 | 616 | — | — | — |
| RPL3-015 | ENST00000484358.1 | 557 | — | — | NR_000026 |
| RPL3-017 | ENST00000481985.1 | 557 | — | — | — |
| RPL3-018 | ENST00000473638.1 | 523 | — | — | — |
| RPL6-002 | ENST00000424576.2 | 1074 | CCDS9162 | F8VR69 F8VU16 | NM_001024662 |
| | | | | F8VWR1 F8VZ45 | NP_001019833 |
| | | | | F8VZA3 Q02878 | |
| | | | | U3KQR5 | |
| RPL6-001 | ENST00000202773.9 | 947 | CCDS9162 | F8VR69 F8VU16 | NM_000970 |
| | | | | F8VWR1 F8VZ45 | NP_000961 |
| | | | | F8VZA3 Q02878 | |
| | | | | U3KQR5 | |
| RPL6-017 | ENST00000550566.2 | 1014 | — | F8VU16 F8VWR1 | — |
| | | | | F8VZ45 F8VZA3 | |
| | | | | U3KQR5 | |
| RPL6-012 | ENST00000551291.2 | 700 | — | F8VU16 F8VWR1 | — |
| | | | | F8VZA3 | |
| RPL6-009 | ENST00000548343.1 | 612 | — | F8VZA3 | — |
| RPL6-008 | ENST00000549847.1 | 588 | — | F8VU16 F8VWR1 | — |
| | | | | F8VZ45 F8VZA3 | |
| RPL6-016 | ENST00000553213.2 | 438 | — | F8VWR1 F8VZA3 | — |
| RPL6-011 | ENST00000550238.1 | 338 | — | F8VR69 | — |
| RPL6-006 | ENST00000546368.2 | 2008 | — | — | — |
| RPL6-003 | ENST00000551041.2 | 1082 | — | — | — |
| RPL6-014 | ENST00000553205.1 | 899 | — | — | — |
| RPL6-015 | ENST00000552455.1 | 781 | — | — | — |
| RPL6-010 | ENST00000549562.1 | 583 | — | — | — |
| RPL18-013 | ENST00000550973.1 | 1111 | — | F8VUA6 | — |
| RPL18-014 | ENST00000549273.1 | 1036 | — | G3V203 | — |
| RPL18-006 | ENST00000084795.5 | 612 | — | F8VUA6 Q0QEW2 | — |
| RPL18-015 | ENST00000546623.1 | 541 | — | — | — |
| RPL18-012 | ENST00000550645.1 | 463 | — | F8VYV2 | — |
| RPL18-010 | ENST00000547897.1 | 440 | — | — | — |
| RPL18-009 | ENST00000549370.1 | 628 | — | F8VXR6 | — |
| RPL18-003 | ENST00000547892.1 | 3844 | — | — | — |
| RPL18-004 | ENST00000551749.1 | 2091 | — | — | — |
| RPL18-005 | ENST00000552347.1 | 1645 | — | — | — |
| RPL18-002 | ENST00000552705.1 | 1081 | — | — | — |
| RPL18-007 | ENST00000550671.1 | 764 | — | — | — |
| RPL18-011 | ENST00000552851.1 | 691 | — | — | — |
| RPL18-016 | ENST00000549533.1 | 666 | — | — | — |
| PPP2CA-001 | ENST00000481195.1 | 4649 | CCDS4173 | B3KQ51 B3KUN1 | NM_002715 |
| | | | | E5RHP4 P67775 | NP_002706 |
| PPP2CA-005 | ENST00000522385.1 | 585 | — | E5RHP4 | — |
| PPP2CA-006 | ENST00000523082.1 | 510 | — | E7ESG8 | — |
| PPP2CA-007 | ENST00000231504.5 | 564 | — | — | — |
| PPP2CA-003 | ENST00000495833.1 | 739 | — | — | — |
| RPL30-007 | ENST00000521291.1 | 575 | CCDS34928 | E5RI99 E5RJH3 | — |
| | | | | P62888 | |
| RPL30-001 | ENST00000287038.3 | 543 | CCDS34928 | E5RI99 E5RJH3 | NM_000989 |
| | | | | P62888 | NP_000980 |
| RPL30-003 | ENST00000521726.1 | 1129 | — | E5RI99 E5RJH3 | — |
| RPL30-009 | ENST00000396070.2 | 440 | — | — | — |
| RPL30-008 | ENST00000523172.1 | 274 | — | — | — |
| RPL30-010 | ENST00000518850.1 | 614 | — | E5RJH3 | — |
| RPL30-002 | ENST00000518164.1 | 1128 | — | — | — |
| RPL30-011 | ENST00000522156.1 | 531 | — | — | — |
| RPL30-012 | ENST00000517805.1 | 433 | — | — | — |
| RPL30-006 | ENST00000520998.1 | 747 | — | — | — |
| RPL30-004 | ENST00000517489.1 | 631 | — | — | — |
| RPL30-005 | ENST00000521112.1 | 573 | — | — | — |
| RPL30-013 | ENST00000521534.1 | 573 | — | — | — |
| CHRM3-001 | ENST00000255380.4 | 8778 | CCDS1616 | B1AN12 P20309 | NM_000740 |
| | | | | Q8NG01 | NP_000731 |
| CHRM3-002 | ENST00000448020.1 | 587 | — | B1AN12 Q8NG01 | — |
| CHRM3-004 | ENST00000468573.1 | 2005 | — | — | — |
| CHRM3-005 | ENST00000481779.1 | 1101 | — | — | — |
| CHRM3-006 | ENST00000492335.1 | 719 | — | — | — |
| CHRM3-003 | ENST00000487470.1 | 581 | — | — | — |
| GRM4-001 | ENST00000538487.2 | 4153 | CCDS4787 | A1L4F9 A8K0J8 | NM_000841 |
| | | | | Q14833 | NM_001256811 |
| | | | | | NP_000832 |
| | | | | | NP_001243740 |
| GRM4-201 | ENST00000374181.4 | 3878 | CCDS4787 | A1L4F9 A8K0J8 | — |
| | | | | Q14833 | |
| GRM4-002 | ENST00000374177.3 | 3590 | CCDS59012 | Q14833 | NM_001256809 |
| | | | | | NP_001243738 |
| GRM4-004 | ENST00000609222.1 | 3176 | CCDS59010 | A8K0J8 | NM_001256813 |
| | | | | | NP_001243742 |
| GRM4-202 | ENST00000535756.1 | 3137 | CCDS59010 | A8K0J8 Q14833 | — |
| GRM4-003 | ENST00000544773.2 | 2983 | CCDS59011 | A8K0J8 Q14833 | NM_001256812 |
| | | | | | NP_001243741 |
| GRM4-005 | ENST00000455714.2 | 2574 | — | A8K0J8 Q14833 | NM_001256814 |
| | | | | | NP_001243743 |
| GRM4-011 | ENST00000609443.1 | 570 | — | — | — |
| GRM4-010 | ENST00000609278.1 | 2978 | — | — | NM_001282847 |
| | | | | | NP_001269776 |
| GRM4-009 | ENST00000545715.1 | 3471 | — | — | — |
| GRM4-012 | ENST00000609915.1 | 555 | — | — | — |
| GRM4-007 | ENST00000609973.1 | 5822 | — | — | — |
| GRM4-008 | ENST00000609860.1 | 3850 | — | — | — |
| GRM4-006 | ENST00000607916.1 | 1004 | — | — | — |
| PDE4C-001 | ENST00000355502.3 | 5979 | CCDS12373 | B7Z2S3 M0R1P5 | — |
| | | | | O76105 Q08493 | |
| | | | | Q32MM7 Q9P1U3 | |
| | | | | Q9UPJ5 | |
| PDE4C-002 | ENST00000594617.3 | 4655 | CCDS12373 | B7Z2S3 M0R1P5 | NM_000923 |
| | | | | O76105 Q08493 | NP_000914 |
| | | | | Q32MM7 Q9P1U3 | |
| | | | | Q9UPJ5 | |
| PDE4C-003 | ENST00000594465.3 | 2988 | CCDS12373 | B7Z2S3 M0R1P5 | — |
| | | | | O76105 Q08493 | |
| | | | | Q32MM7 Q9P1U3 | |
| | | | | Q9UPJ5 | |
| PDE4C-005 | ENST00000447275.3 | 2542 | CCDS46016 | Q08493 Q32MM7 | NM_001098819 |
| | | | | Q9P1U3 Q9UPJ5 | NP_001092289 |
| PDE4C-004 | ENST00000262805.12 | 2472 | CCDS42523 | Q08493 Q32MM7 | NM_001098818 |
| | | | | Q9P1U3 Q9UPJ5 | NP_001092288 |
| PDE4C-201 | ENST00000539010.1 | 1699 | — | Q32MM7 Q9P1U3 | — |
| | | | | Q9UPJ5 | |
| PDE4C-007 | ENST00000597297.1 | 1559 | — | O43850 Q9P1U3 | — |
| | | | | Q9UPJ5 | |
| PDE4C-008 | ENST00000598111.2 | 1284 | — | O76104 Q9P1U3 | — |
| PDE4C-016 | ENST00000610023.1 | 583 | — | — | — |
| PDE4C-010 | ENST00000599754.1 | 528 | — | M0R1P5 | — |
| PDE4C-009 | ENST00000599188.1 | 2101 | — | B7Z6T1 | — |
| PDE4C-012 | ENST00000593594.1 | 481 | — | — | — |
| PDE4C-013 | ENST00000595343.1 | 420 | — | — | — |
| PDE4C-015 | ENST00000596647.1 | 619 | — | — | NR_036575 |
| PDE4C-006 | ENST00000597360.1 | 3511 | — | — | — |
| PDE4C-014 | ENST00000600667.2 | 702 | — | — | — |
| PDE4C-011 | ENST00000597573.1 | 603 | — | — | — |
| PIP5K1C-001 | ENST00000335312.3 | 5080 | CCDS32872 | O60331 Q7LE22 | NM_001195733 |
| | | | | | NM_012398 |
| | | | | | NP_001182662 |
| | | | | | NP_036530 |
| PIP5K1C-002 | ENST00000539785.1 | 2289 | CCDS56074 | O60331 Q7LE22 | — |
| PIP5K1C-005 | ENST00000537021.1 | 3326 | — | O60331 Q7LE22 | — |
| PIP5K1C-003 | ENST00000589578.1 | 2933 | — | O60331 Q7LE22 | — |
| PIP5K1C-004 | ENST00000587482.1 | 1311 | — | — | — |
| PIP5K1C-006 | ENST00000592530.1 | 456 | — | — | — |
| XCR1-001 | ENST00000309285.3 | 5281 | CCDS2736 | P46094 Q689E2 | NM_001024644 |
| | | | | | NP_001019815 |
| XCR1-201 | ENST00000542109.1 | 1373 | CCDS2736 | P46094 Q689E2 | NM_005283 |
| | | | | | NP_005274 |
| XCR1-002 | ENST00000395946.2 | 332 | — | Q689E2 | — |
| DLC1-001 | ENST00000276297.4 | 7447 | CCDS5989 | Q96QB1 | NM_182643 |
| | | | | | NP_872584 |
| DLC1-002 | ENST00000358919.2 | 4392 | CCDS5990 | Q45XF9 Q96QB1 | NM_006094 |
| | | | | | NP_006085 |
| DLC1-008 | ENST00000520226.1 | 3556 | CCDS55201 | Q96QB1 | NM_001164271 |
| | | | | | NP_001157743 |
| DLC1-004 | ENST00000511869.1 | 2451 | CCDS5991 | Q96QB1 | NM_024767 |
| | | | | | NP_079043 |
| DLC1-005 | ENST00000512044.2 | 3758 | — | E9PDZ8 | — |
| DLC1-003 | ENST00000316609.5 | 1837 | — | Q96QB1 | — |
| DLC1-016 | ENST00000503161.2 | 562 | — | E5RI70 | — |
| DLC1-019 | ENST00000517868.2 | 383 | — | — | — |
| DLC1-006 | ENST00000510318.1 | 2028 | — | — | — |
| DLC1-007 | ENST00000513883.1 | 920 | — | — | — |
| DLC1-012 | ENST00000515225.1 | 582 | — | — | — |
| DLC1-013 | ENST00000517333.1 | 575 | — | — | — |
| DLC1-010 | ENST00000506171.1 | 560 | — | — | — |
| DLC1-009 | ENST00000509922.1 | 455 | — | — | — |
| DLC1-017 | ENST00000510250.2 | 1925 | — | — | — |
| DLC1-018 | ENST00000521730.1 | 485 | — | — | — |
| PAK2-001 | ENST00000327134.3 | 6139 | CCDS3321 | H9XFB4 Q13177 | NM_002577 |
| | | | | | NP_002568 |
| PAK2-004 | ENST00000426668.1 | 689 | — | — | — |
| PAK2-003 | ENST00000481344.1 | 371 | — | — | — |
| PRKCA-002 | ENST00000413366.3 | 8751 | CCDS11664 | L7RSM7 P17252 | NM_002737 |
| | | | | | NP_002728 |
| PRKCA-003 | ENST00000284384.6 | 2718 | — | — | — |
| PRKCA-001 | ENST00000578063.1 | 1733 | — | J3KRN5 Q7Z727 | — |
| PRKCA-005 | ENST00000583361.1 | 519 | — | — | — |
| PRKCA-004 | ENST00000583775.1 | 321 | — | — | — |
| HISTIHIA- | ENST00000244573.3 | 781 | CCDS4569 | Q02539 | NM_005325 |
| 002 | | | | | NP_005316 |
| HNF1A-001 | ENST00000257555.6 | 3442 | — | B8YNU9 B8YNW1 | — |
| | | | | E0YMJ1 E0YMJ2 | |
| HNF1A-023 | ENST00000541395.1 | 3332 | — | B8YNU9 B8YNW1 | NM_000545 |
| | | | | F5H5U3 | NP_000536 |
| HNF1A-003 | ENST00000402929.1 | 3002 | — | B8YNU9 B8YNW1 | — |
| | | | | U3KPW5 | |
| HNF1A-002 | ENST00000400024.2 | 2337 | — | B8YNU9 B8YNW1 | — |
| | | | | E0YMK2 U3KQS6 | |
| HNF1A-025 | ENST00000544413.1 | 2014 | — | B8YNU9 B8YNW1 | — |
| | | | | F5H0K0 | |
| HNF1A-201 | ENST00000543427.1 | 1493 | — | B8YNW1 P20823 | — |
| HNF1A-017 | ENST00000538626.1 | 582 | — | E0YMK3 | — |
| HNF1A-020 | ENST00000535955.1 | 434 | — | U3KQ02 | — |
| HNF1A-024 | ENST00000540108.1 | 3039 | — | B8YNU9 E2I9R5 | — |
| HNF1A-027 | ENST00000560968.1 | 3030 | — | B8YNU9 E0YMI8 | — |
| HNF1A-015 | ENST00000538646.1 | 1649 | — | B8YNU9 P20823 | — |
| HNF1A-014 | ENST00000541924.1 | 1594 | — | B8YNU9 P20823 | — |
| HNF1A-016 | ENST00000544574.1 | 725 | — | F5H3Z5 | — |
| HNF1A-026 | ENST00000543255.1 | 762 | — | — | — |
| APOB-001 | ENST00000233242.1 | 14121 | — | P04114 Q13828 | NM_000384 |
| | | | | Q9UE52 Q9UE53 | NP_000375 |
| | | | | S5FVK9 | |
| APOB-002 | ENST00000399256.4 | 3128 | — | A8MUN2 | — |
| ALDH2-001 | ENST00000261733.2 | 2018 | CCDS9155 | B0LUF9 B4YAH7 | NM_000690 |
| | | | | P05091 Q9UN17 | NP_000681 |
| ALDH2-003 | ENST00000416293.3 | 1572 | CCDS55885 | B0LUF9 B4YAH7 | NM_001204889 |
| | | | | P05091 Q9UN17 | NP_001191818 |
| ALDH2-005 | ENST00000548536.1 | 1760 | — | F8VSB0 | — |
| ALDH2-007 | ENST00000549106.1 | 580 | — | — | — |
| VAMP3-201 | ENST00000054666.11 | 2178 | — | Q15836 Q6FGG2 | — |
| VAMP3-202 | ENST00000470357.1 | 954 | — | K7EKX0 | — |
| VAMP3-203 | ENST00000487194.1 | 274 | — | — | — |
| CYP4V2-201 | ENST00000378802.5 | 4657 | CCDS34119 | Q6ZWL3 | — |
| CYP4V2-202 | ENST00000502665.1 | 3628 | — | — | — |
| CYP4V2-204 | ENST00000513354.5 | 1062 | — | — | — |
| CYP4V2-203 | ENST00000507209.5 | 8646 | — | — | — |
| BRD2-201 | ENST00000374825.9 | 4956 | CCDS4762 | A0A024RCR5 | NM_005104.4 |
| | | | | P25440 | |
| BRD2-202 | ENST00000374831.8 | 4807 | CCDS4762 | A0A024RCR5 | — |
| | | | | P25440 | |
| BRD2-203 | ENST00000395287.5 | 3467 | CCDS56420 | P25440 | — |
| BRD2-205 | ENST00000449085.3 | 3210 | CCDS56421 | P25440 X5CF57 | — |
| BRD2-204 | ENST00000449025.5 | 3210 | — | H0Y6K2 | — |
| BRD2-219 | ENST00000607833.5 | 2338 | — | U3KQA6 | — |
| BRD2-206 | ENST00000456339.5 | 887 | — | H0Y799 | — |
| BRD2-214 | ENST00000496118.2 | 735 | — | J3QR72 | — |
| BRD2-218 | ENST00000606059.1 | 565 | — | U3KPW0 | — |
| BRD2-212 | ENST00000482914.5 | 4834 | — | E9PKQ9 | — |
| BRD2-213 | ENST00000495733.5 | 3404 | — | E9PIQ3 | — |
| BRD2-210 | ENST00000481259.1 | 667 | — | H0YDJ7 | — |
| BRD2-215 | ENST00000580234.1 | 718 | — | — | — |
| BRD2-216 | ENST00000581002.1 | 550 | — | — | — |
| BRD2-217 | ENST00000584808.1 | 547 | — | — | — |
| BRD2-209 | ENST00000469132.1 | 1628 | — | — | — |
| BRD2-208 | ENST00000464592.5 | 1590 | — | — | — |
| BRD2-207 | ENST00000463639.1 | 946 | — | — | — |
| BRD2-211 | ENST00000482838.1 | 759 | — | — | — |
| HLA-DQA2- | ENST00000374940.3 | 1524 | CCDS4753 | P01906 | — |
| 210 | | | | Q76NI6 | — |
| KIF21B-201 | ENST00000332129.6 | 9897 | CCDS30965 | O75037 | — |
| KIF21B-203 | ENST00000422435.2 | 5519 | CCDS58056 | O75037 | — |
| KIF21B-204 | ENST00000461742.6 | 5428 | CCDS58055 | O75037 | — |
| KIF21B-202 | ENST00000360529.9 | 5389 | CCDS58054 | O75037 | — |
| KIF21B-205 | ENST00000534043.1 | 3065 | — | — | — |
| PCDH7-201 | ENST00000361762.3 | 6403 | — | O60245 | — |
| PCDH7-206 | ENST00000543491.2 | 4457 | — | O60245 | — |
| PCDH7-205 | ENST00000511884.6 | 6769 | — | H0YAH0 | — |
| PCDH7-208 | ENST00000621961.1 | 2029 | — | A0A087X2C4 | — |
| PCDH7-203 | ENST00000509759.2 | 865 | — | A0A087X0C9 | — |
| PCDH7-204 | ENST00000509925.5 | 543 | — | — | — |
| PCDH7-202 | ENST00000507864.1 | 340 | — | — | — |
| PCDH7-207 | ENST00000610830.1 | 287 | — | — | — |
| ANK3-201 | ENST00000280772.7 | 17019 | CCDS7258 | Q12955 | NM_020987.5 |
| ANK3-205 | ENST00000373827.6 | 7202 | CCDS55712 | Q12955 | — |
| ANK3-216 | ENST00000503366.5 | 5792 | CCDS55711 | Q12955 | — |
| ANK3-202 | ENST00000355288.6 | 3811 | CCDS7259 | Q12955 | — |
| ANK3-224 | ENST00000610321.4 | 4930 | — | A0A087WTF3 | — |
| ANK3-228 | ENST00000616444.4 | 2939 | — | A0A087WZ65 | — |
| ANK3-204 | ENST00000373820.5 | 2358 | — | H0Y3A4 | — |
| ANK3-206 | ENST00000459732.2 | 1466 | — | A0A087WWI5 | — |
| ANK3-225 | ENST00000610901.4 | 965 | — | A0A087WVC2 | — |
| ANK3-217 | ENST00000503925.1 | 947 | — | D6RHY3 | — |
| ANK3-211 | ENST00000474360.1 | 761 | — | H0Y8Z4 | — |
| ANK3-227 | ENST00000613207.4 | 724 | — | A0A087WTE8 | — |
| ANK3-226 | ENST00000612776.4 | 681 | — | A0A087WY90 | — |
| ANK3-207 | ENST00000460468.5 | 677 | — | D6RF31 | — |
| ANK3-203 | ENST00000373815.5 | 660 | — | B1AQT1 | — |
| ANK3-215 | ENST00000502769.5 | 657 | — | H0Y951 | — |
| ANK3-223 | ENST00000514197.5 | 651 | — | H0YAH5 | — |
| ANK3-230 | ENST00000618080.4 | 604 | — | A0A087WZ26 | — |
| ANK3-209 | ENST00000467420.6 | 587 | — | H0Y9E9 | — |
| ANK3-218 | ENST00000506635.5 | 569 | — | D6RBY7 | — |
| ANK3-221 | ENST00000511043.5 | 562 | — | H0YA66 | — |
| ANK3-229 | ENST00000617800.4 | 545 | — | A0A087WX55 | — |
| ANK3-222 | ENST00000513049.5 | 544 | — | D6RFK6 | — |
| ANK3-213 | ENST00000486349.2 | 493 | — | A0A087X0L3 | — |
| ANK3-232 | ENST00000622427.4 | 5071 | — | A0A087X0B4 | — |
| ANK3-231 | ENST00000621739.1 | 3166 | — | A0A087WTP5 | — |
| ANK3-220 | ENST00000510382.1 | 1226 | — | — | — |
| ANK3-212 | ENST00000480699.5 | 489 | — | — | — |
| ANK3-214 | ENST00000489505.2 | 2268 | — | — | — |
| ANK3-210 | ENST00000469721.3 | 738 | — | — | — |
| ANK3-208 | ENST00000465749.2 | 554 | — | — | — |
| ANK3-219 | ENST00000508449.1 | 470 | — | — | — |
| TRIM38-201 | ENST00000357085.5 | 418 | CCDS4568 | A0A024QZY4 | NM_006355.5 |
| | | | | O00635 | |

### II. COMPOSITIONS

[0909] Aspects disclosed herein provide compositions comprising a nucleic acid sequence with at least 10 but less than 50 contiguous nucleobases of any one of SEQ ID NOS: 1-439, wherein the contiguous nucleobases comprise a risk allele (see Table 1 and 2), and wherein the nucleic acid sequence comprises a detectable molecule or moiety. In some embodiments, the risk allele is a risk allele listed in Table 1 and/or Table 2. The detectable molecule may be any molecule suitable for nucleic acid detection. In some embodiments, the detectable molecule is a fluorophore. In some embodiments, the composition is complementary to at least about 10 and less than 50 contiguous nucleobases within the sequence of a polymorphism of Table 1 or Table 2 and/or gene from Table 3 and/or Table 4. Additional compositions include those having a sequence that is a reverse complement to those described herein. In some embodiments the contiguous nucleobase residues are connected to a quencher.

[0910] Primers capable of amplifying at least 10 but less than 50 contiguous nucleobases of any one of SEQ ID NOS: 1-439 are provided herein, wherein the contiguous nucleobases comprise a risk allele (see Table 1 and 2). In addition, primers capable of amplifying at least 10 but less than 50 contiguous nucleobases of a nucleic acid sequence of phosphodiesterase 4C (PDE4C), adenylate cyclase 7 (ADCY7), intercellular adhesion molecule 3 (ICAM3), interleukin 18 binding protein (IL18BP), and oncostatin-M-specific receptor subunit (OSMR), or SMAD Family Member 3 (SMAD3), are also provided herein.

[0911] Also provided are primers capable of amplifying at least 10 but less than 50 contiguous nucleobases of a nucleic acid sequence of one or more of protein tyrosine phosphatase, non-receptor type 11 (PTPN11), ribosomal protein (RL30), X-C motif chemokine receptor 1 (XCR1), HNF1 homeobox A (HNF1), ribosomal protein L3 (RPL3), cholinergic receptor muscarinic 3 (CHRM3), DLC1 Rho GTPase activating protein (DLC1), apolipoprotein B (APOB), ribosomal protein L6 (RPL6), glutamate metabotropic receptor 4 (GRM4), p21 (RAC1) activated kinase 2 (PAK2), ribosomal protein L18 (RPL18), phosphodiesterase 4C (PDE4C), protein kinase C alpha (PRKCA), protein phosphatase 2 catalytic subunit alpha (PPP2CA), phosphatidylinositol-4-phosphate 5-kinase type 1 gamma (PIP5K1C), histone cluster 1 H1 family member A (HIST1H1A), Aldehyde Dehydrogenase 2 Family Member (ALDH2), bromodomain containing 2 (BRD2), major histocompatibility complex, class II, DQ alpha 2 (HLA-DQA2), kinesin family member 21B (KIF21B), Protocadherin 7 (PCDH7), Ankyrin 3 (ANK3), Tripartite Motif Containing 38 (TRIM38), Cytochrome P450 Family 4 Subfamily V Member 2 (CYP4V2), Vesicle Associated Membrane Protein 3 (VAMP3).

[0912] Also provided herein are compositions comprising an antibody or antigen-binding fragment that specifically binds to ALDH2, BRD2, HLA-DQA2, KIF21B, PCDH7, ANK3, TRIM38, CYP4V2, VAMP3, PTPN11, RPL30, XCR1, HNF1A, RPL3, CHRM3, DLC1, APOB, RPL6, GRM4, PAK2, RPL18, PDE4C, PRKCA, PPP2CA, PIP5K1C, HIST1H1A PDE4C, ADCY7, ICAM3, IL18BP, OSMR, or SMAD3, wherein the antibody or antigen-binding fragment comprises a detectable molecule. In various embodiments, the antibody comprises a monoclonal antibody, a chimeric antibody, a CDR-grafted antibody, a a Fab, a Fab′, a F(ab′)₂, a Fv, a disulfide linked Fv, a scFv, a single domain antibody, a diabody, a multispecific antibody, a dual specific antibody, an anti-idiotypic antibody, or a bispecific antibody. In some embodiments, the antibody or antigen-binding fragment comprises an IgG antibody, an IgM antibody, and/or an IgE antibody. In some embodiments, the detectable molecule comprises a fluorophore. In some embodiments, the antibody or antigen-binding fragment is conjugated to a paramagnetic particle (e.g., bead).

### III. KITS

[0913] Disclosed herein, in some embodiments, are kits useful for to detect the genotypes and/or biomarkers disclosed herein. In some embodiments, the kits disclosed herein may be used to diagnose and/or treat a disease or condition in a subject; or select a patient for treatment and/or monitor a treatment disclosed herein. In some embodiments, the kit comprises the compositions described herein, which can be used to perform the methods described herein. Kits comprise an assemblage of materials or components, including at least one of the compositions. Thus, in some embodiments the kit contains a composition including of the pharmaceutical composition, for the treatment of IBD. In other embodiments, the kits contains all of the components necessary and/or sufficient to perform an assay for detecting and measuring IBD markers, including all controls, directions for performing assays, and any necessary software for analysis and presentation of results.

[0914] In some instances, the kits described herein comprise components for detecting the presence, absence, and/or quantity of a target nucleic acid and/or protein described herein. In some embodiments, the kit comprises the compositions (e.g., primers, probes, antibodies) described herein. The disclosure provides kits suitable for assays such as enzyme-linked immunosorbent assay (ELISA), single-molecular array (Simoa), PCR, and qPCR. The exact nature of the components configured in the kit depends on its intended purpose. For example, some embodiments are configured for the purpose of treating a disease or condition disclosed herein (e.g., IBD, CD, UC) in a subject. In some embodiments, the kit is configured particularly for the purpose of treating mammalian subjects. In some embodiments, the kit is configured particularly for the purpose of treating human subjects. In further embodiments, the kit is configured for veterinary applications, treating subjects such as, but not limited to, farm animals, domestic animals, and laboratory animals. In some embodiments, the kit is configured to select a subject for a therapeutic agent, such as those disclosed herein. In some embodiments, the kit is configured to select a subject for treatment with an agonist of ADCY7 or an inhibitor of PDE4.

[0915] Instructions for use may be included in the kit. Optionally, the kit also contains other useful components, such as, diluents, buffers, pharmaceutically acceptable carriers, syringes, catheters, applicators, pipetting or measuring tools, bandaging materials or other useful paraphernalia The materials or components assembled in the kit can be provided to the practitioner stored in any convenient and suitable ways that preserve their operability and utility. For example the components can be in dissolved, dehydrated, or lyophilized form; they can be provided at room, refrigerated or frozen temperatures. The components are typically contained in suitable packaging material(s). As employed herein, the phrase “packaging material” refers to one or more physical structures used to house the contents of the kit, such as compositions and the like. The packaging material is constructed by well-known methods, preferably to provide a sterile, contaminant-free environment. The packaging materials employed in the kit are those customarily utilized in gene expression assays and in the administration of treatments. As used herein, the term “package” refers to a suitable solid matrix or material such as glass, plastic, paper, foil, and the like, capable of holding the individual kit components. Thus, for example, a package can be a glass vial or prefilled syringes used to contain suitable quantities of the pharmaceutical composition. The packaging material has an external label which indicates the contents and/or purpose of the kit and its components.

[0916] Disclosed herein are methods of contacting DNA from a subject with the composition described herein, or using the kit described herein under conditions configured to hybridize the composition to the DNA if the DNA comprises a sequence complementary to the composition. In further embodiments, provided herein are methods of treating the subject with an inhibitor of PDE4 activity or expression or an agonist of ADCY7, such as those disclosed herein, provided that the DNA from the subject comprises the sequence complementary to the composition. In some embodiments, the PDE4 inhibitor comprises Apremilast.

### IV. SYSTEMS

[0917] Provided herein are systems of analyzing gene or gene products (e.g, transcriptomic risk signature) in a sample obtained from a subject to diagnose, prognose, or treat an inflammatory bowel disease (IBD), such as Crohn's disease (CD) and ulcerative colitis (UC). In some cases, a sample obtained from a subject (directly or indirectly) is analyzed for a presence of a transcriptomic risk signature. Once the transcriptomic risk signature is detected in the subject, in some cases, the subject is administered a therapeutically effective amount of an agonist of ADCY7 or an inhibitor of PDE4. In some cases, the subject is selected for treatment with an agonist of ADCY7 or an inhibitor of PDE4, provided the transcriptomic risk signature is detected using the systems disclosed herein. The transcriptomic risk signature may involve one gene. Alternatively, the transcriptomic risk signature involves multiple genes, for e.g, 2, 3, 4, 5, 6, 7, 8, 9, 10, 11, 12, 13, 14, 15, 16, or 17 genes described herein.

[0918] Systems disclosed herein comprise analyzing a sample obtained from a subject to detect a presence of a transcriptomic risk signature that is predictive of a severe form of CD characteristic of CD3, which in some cases involves detecting a level of protein tyrosine phosphatase, non-receptor type 11 (PTPN11). In some cases, the transcriptomic risk signature is a downregulation of PTPN11, as compared to a normal (e.g, non-diseased individual), or an individual with a less severe form of CD, such as CD1. In some cases, the transcriptomic risk signature is detected by detecting a level of gene expression product expressed from PTPN11. In some cases, the transcriptomic risk signature is detected by detecting a presence of a single nucleotide polymorphism (SNP) associated with the downregulation of PTPN11. In some cases, the SNP is at rs2301756 and comprises a “G” allele, which is provided in SEQ ID NO: 339. In some cases, the SNP is rs7958372 and comprises an “A” allele, which is provided in SEQ ID NO: 408. The transcriptomic signature may be detected with a single SNP. Alternatively, the transcriptomic risk signature may be detected with multiple SNPs described herein, for e.g., both rs2301756 and rs7958372.

[0919] Systems disclosed herein comprise analyzing a sample obtained from a subject to detect a presence of a transcriptomic risk signature that is predictive of a severe form of CD characteristic of CD3, which in some cases involves detecting a level of ribosomal protein (RL30). In some cases, the transcriptomic risk signature is a downregulation of RPL30, as compared to a normal (e.g., non-diseased individual), or an individual with a less severe form of CD, such as CD1. In some cases, the transcriptomic risk signature is detected by detecting a level of gene expression product expressed from RPL30. In some cases, the transcriptomic risk signature is detected by detecting a presence of a SNP associated with the downregulation of RPL30. In some cases, the SNP is at rs2877453 and comprises a “C” allele, which is provided in SEQ ID NO: 353.

[0920] Systems disclosed herein comprise analyzing a sample obtained from a subject to detect a presence of a transcriptomic risk signature that is predictive of a severe form of CD characteristic of CD3, which in some cases involves detecting a level of X-C motif chemokine receptor 1 (XCR1). In some cases, the transcriptomic risk signature is an upregulation of XCR1, as compared to a normal (e.g, non-diseased individual), or an individual with a less severe form of CD, such as CD1. In some cases, the transcriptomic risk signature is detected by detecting a level of gene expression product expressed from XCR1. In some cases, the transcriptomic risk signature is detected by detecting a presence of a SNP associated with the upregulation of XCR1. In some cases, the SNP is selected from the group consisting of a G at rs36040135 (SEQ ID NO: 378), a “G” at rs13074382 (SEQ ID NO: 379), a “G” at rs13097556 (SEQ ID NO: 380), a “G” at rs2230322 (SEQ ID NO: 381), and an “A” at rs71327010 (SE ID NO: 382). The transcriptomic signature may be detected with a single SNP. Alternatively, the transcriptomic risk signature may be detected with multiple SNPs described herein, for e.g., two or more of rs36040135, rs13074382, rs13097556, rs2230322, and rs71327010.

[0921] Systems disclosed herein comprise analyzing a sample obtained from a subject to detect a presence of a transcriptomic risk signature that is predictive of a severe form of CD characteristic of CD3, which in some cases involves detecting a level of HNF1 homeobox A (HNF1). In some cases, the transcriptomic risk signature is an upregulation of HNF1, as compared to a normal (e.g, non-diseased individual), or an individual with a less severe form of CD, such as CD1. In some cases, the transcriptomic risk signature is detected by detecting a level of gene expression product expressed from HNF1. In some cases, the transcriptomic risk signature is detected by detecting a presence of a SNP associated with the upregulation of HNF1. In some cases, the SNP is selected from the group consisting of a “G” at rs2244608 (SEQ ID NO: 424), a “C” at rs1169302 (SEQ ID NO: 336), and a “G” at rs1169303 (SEQ ID NO: 337). The transcriptomic signature may be detected with a single SNP. Alternatively, the transcriptomic risk signature may be detected with multiple SNPs described herein, e.g., two or more of rs2244608, rs1169302, and rs1169303.

[0922] Systems disclosed herein comprise analyzing a sample obtained from a subject to detect a presence of a transcriptomic risk signature that is predictive of a severe form of CD characteristic of CD3, which in some cases involves detecting a level of ribosomal protein L3 (RPL3). In some cases, the transcriptomic risk signature is a downregulation of RPL3, as compared to a normal (e.g., non-diseased individual), or an individual with a less severe form of CD, such as CD1. In some cases, the transcriptomic risk signature is detected by detecting a level of gene expression product expressed from RPL3 In some cases, the transcriptomic risk signature is detected by detecting a presence of a SNP associated with the downregulation of RPL3. In some cases, the SNP is an “A” at rs6519183, which is provided in SEQ ID NO: 174.

[0923] Systems disclosed herein comprise analyzing a sample obtained from a subject to detect a presence of a transcriptomic risk signature that is predictive of a severe form of CD characteristic of CD3, which in some cases involves detecting a level of cholinergic receptor muscarinic 3 (CHRM3). In some cases, the transcriptomic risk signature is a upregulation of CHRM3, as compared to anormal (e.g, non-diseased individual), or an individual with a less severe form of CD, such as CD1. In some cases, the transcriptomic risk signature is detected by detecting a level of gene expression product expressed from CHRM3. In some cases, the transcriptomic risk signature is detected by detecting a presence of a SNP associated with the upregulation of CHRM3. In some cases, the SNP is a “C” at rs685548, which is provided in SEQ ID NO: 423.

[0924] Systems disclosed herein comprise analyzing a sample obtained from a subject to detect a presence of a transcriptomic risk signature that is predictive of a severe form of CD characteristic of CD3, which in some cases involves detecting a level of DLC1 Rho GTPase activating protein (DLC1). In some cases, the transcriptomic risk signature is a downregulation of DLC1, as compared to a normal (e.g, non-diseased individual), or an individual with a less severe form of CD, such as CD1. In some cases, the transcriptomic risk signature is detected by detecting a level of gene expression product expressed from DLC1. In some cases, the transcriptomic risk signature is detected by detecting a presence of a SNP associated with the downregulation of DLC1. In some cases, the SNP is an “A” at rs11998187A, which is provided in SEQ ID NO: 404.

[0925] Systems disclosed herein comprise analyzing a sample obtained from a subject to detect a presence of a transcriptomic risk signature that is predictive of a severe form of CD characteristic of CD3, which in some cases involves detecting a level of apolipoprotein B (APOB). In some cases, the transcriptomic risk signature is a downregulation of APOB, as compared to a normal (e.g, non-diseased individual), or an individual with a less severe form of CD, such as CD1. In some cases, the transcriptomic risk signature is detected by detecting a level of gene expression product expressed from APOB. In some cases, the transcriptomic risk signature is detected by detecting a presence of a SNP associated with the downregulation of APOB. In some cases, the SNP is selected from the group consisting of an “A” at rs531819 (SEQ ID NO: 258), a “G” at rs1041968 (SEQ ID NO: 354), a “G” at rs693 (SEQ ID NO: 388), an “A” at rs512535 (SEQ ID NO: 400), a “G” at rs550619 (SEQ ID NO: 406), an “A” at rs570877 (SEQ ID NO: 407), and a “G” at rs12713956 (SEQ ID NO: 437). The transcriptomic signature may be detected with a single SNP. Alternatively, the transcriptomic risk signature may be detected with multiple SNPs described herein, e.g, two or more of rs531819, rs1041968, rs693, rs512535, rs550619, rs570877, and rs12713956.

[0926] Systems disclosed herein comprise analyzing a sample obtained from a subject to detect a presence of a transcriptomic risk signature that is predictive of a severe form of CD characteristic of CD3, which in some cases involves detecting a level of ribosomal protein L6 (RPL6). In some cases, the transcriptomic risk signature is a downregulation of RPL6, as compared to a normal (e.g., non-diseased individual), or an individual with a less severe form of CD, such as CD1. In some cases, the transcriptomic risk signature is detected by detecting a level of gene expression product expressed from RPL6. In some cases, the transcriptomic risk signature is detected by detecting a presence of a SNP associated with the downregulation of RPL6. In some cases, the SNP is an “A” at rs2301723A, which is provided in SEQ ID NO: 340.

[0927] Systems disclosed herein comprise analyzing a sample obtained from a subject to detect a presence of a transcriptomic risk signature that is predictive of a severe form of CD characteristic of CD3, which in some cases involves detecting a level of glutamate metabotropic receptor 4 (GRM4). In some cases, the transcriptomic risk signature is an upregulation of GRM4, as compared to a normal (e.g, non-diseased individual), or an individual with a less severe form of CD, such as CD1. In some cases, the transcriptomic risk signature is detected by detecting a level of gene expression product expressed from GRM4. In some cases, the transcriptomic risk signature is detected by detecting a presence of a SNP associated with the upregulation of GRM4. In some cases, the SNP is an “A” at rs2499714A, which is provided in SEQ ID NO: 181.

[0928] Systems disclosed herein comprise analyzing a sample obtained from a subject to detect a presence of a transcriptomic risk signature that is predictive of a severe form of CD characteristic of CD3, which in some cases involves detecting a level of p21 (RAC1) activated kinase 2 (PAK2). In some cases, the transcriptomic risk signature is a downregulation of PAK2, as compared to a normal (e.g, non-diseased individual), or an individual with a less severe form of CD, such as CD1. In some cases, the transcriptomic risk signature is detected by detecting a level of gene expression product expressed from PAK2. In some cases, the transcriptomic risk signature is detected by detecting a presence of a SNP associated with the downregulation of PAK2. In some cases, the SNP is an “A” at rs6583176, which is provided in SEQ ID NO: 341.

[0929] Systems disclosed herein comprise analyzing a sample obtained from a subject to detect a presence of a transcriptomic risk signature that is predictive of a severe form of CD characteristic of CD3, which in some cases involves detecting a level of ribosomal protein L18 (RPL18). In some cases, the transcriptomic risk signature is a downregulation of RPL18, as compared to a normal (e.g., non-diseased individual), or an individual with a less severe form of CD, such as CD1. In some cases, the transcriptomic risk signature is detected by detecting a level of gene expression product expressed from RPL18. In some cases, the transcriptomic risk signature is detected by detecting a presence of a SNP associated with the downregulation of RPL18. In some cases, the SNP is an “A” at rs369880, which is provided in SEQ ID NO: 395.

[0930] Systems disclosed herein comprise analyzing a sample obtained from a subject to detect a presence of a transcriptomic risk signature that is predictive of a severe form of CD characteristic of CD3, which in some cases involves detecting a level of phosphodiesterase 4C (PDE4C). In some cases, the transcriptomic risk signature is an upregulation of PDE4C, as compared to a normal (e.g., non-diseased individual), or an individual with a less severe form of CD, such as CD1. In some cases, the transcriptomic risk signature is detected by detecting a level of gene expression product expressed from PDE4C. In some cases, the transcriptomic risk signature is detected by detecting a presence of a SNP associated with the upregulation of PDE4C. In some cases, the SNP is a “G” at rs57884093G, which is provided in SEQ ID NO: 396.

[0931] Systems disclosed herein comprise analyzing a sample obtained from a subject to detect a presence of a transcriptomic risk signature that is predictive of a severe form of CD characteristic of CD3, which in some cases involves detecting a level of protein kinase C alpha (PRKCA). In some cases, the transcriptomic risk signature is an upregulation or downregulation of PRKCA, as compared to a normal (e.g, non-diseased individual), or an individual with a less severe form of CD, such as CD1. In some cases, the transcriptomic risk signature is detected by detecting a level of gene expression product expressed from PRKCA. In some cases, the transcriptomic risk signature is detected by detecting a presence of a SNP associated with the upregulation or downregulation of PRKCA. In some cases, the SNP is an “A” at rs9896905, which is provided in SEQ ID NO: 321.

[0932] Systems disclosed herein comprise analyzing a sample obtained from a subject to detect a presence of a transcriptomic risk signature that is predictive of a severe form of CD characteristic of CD3, which in some cases involves detecting a level of protein phosphatase 2 catalytic subunit alpha (PPP2CA). In some cases, the transcriptomic risk signature is a downregulation of PPP2CA, as compared to a normal (e.g, non-diseased individual), or an individual with a less severe form of CD, such as CD1. In some cases, the transcriptomic risk signature is detected by detecting a level of gene expression product expressed from PPP2CA. In some cases, the transcriptomic risk signature is detected by detecting a presence of a SNP associated with the downregulation of PPP2CA. In some cases, the SNP is an “A” at rs7704116, which is provided in SEQ ID NO: 348.

[0933] Systems disclosed herein comprise analyzing a sample obtained from a subject to detect a presence of a transcriptomic risk signature that is predictive of a severe form of CD characteristic of CD3, which in some cases involves detecting a level of phosphatidylinositol-4-phosphate 5-kinase type 1 gamma (PIP5K1C). In some cases, the transcriptomic risk signature is an upregulation or a downregulation of PIP5K1C, as compared to a normal (e.g., non-diseased individual), or an individual with a less severe form of CD, such as CD1. In some cases, the transcriptomic risk signature is detected by detecting a level of gene expression product expressed from PIP5K1C. In some cases, the transcriptomic risk signature is detected by detecting a presence of a SNP associated with the downregulation of PIP5K1C. In some cases, the SNP is an “A” at rs12984273, which is provided in SEQ ID NO: 405.

[0934] Systems disclosed herein comprise analyzing a sample obtained from a subject to detect a presence of a transcriptomic risk signature that is predictive of a severe form of CD characteristic of CD3, which in some cases involves detecting a level of histone cluster 1 H1 family member A (HIST1H1A). In some cases, the transcriptomic risk signature is a downregulation of HIST1H1A, as compared to a normal (e.g, non-diseased individual), or an individual with a less severe form of CD, such as CD1. In some cases, the transcriptomic risk signature is detected by detecting a level of gene expression product expressed from HIST1H1A In some cases, the transcriptomic risk signature is detected by detecting a presence of a SNP associated with the downregulation of XCR10. In some cases, the SNP is a “G” at rs16891235, which is provided in SEQ ID NO: 236.

[0935] Systems disclosed herein comprise analyzing a sample obtained from a subject to detect a presence of a transcriptomic risk signature that is predictive of a severe form of CD characteristic of CD3, which in some cases involves detecting a level of Aldehyde Dehydrogenase 2 Family Member (ALDH2). In some cases, the transcriptomic risk signature is a downregulation of ALDH2, as compared to a normal (e.g, non-diseased individual), or an individual with a less severe form of CD, such as CD1. In some cases, the transcriptomic risk signature is detected by detecting a level of gene expression product expressed from ALDH2. In some cases, the transcriptomic risk signature is detected by detecting a presence of a SNP associated with the downregulation of ALDH2. In some cases, the SNP is at rs7296651 and comprises a “C” allele, which is provided in SEQ ID NO: 412.

[0936] Systems disclosed herein comprise analyzing a sample obtained from a subject to detect a presence of a transcriptomic risk signature that is predictive of a severe form of CD characteristic of CD3, which in some cases involves detecting a level of BRD2. In some cases, the transcriptomic risk signature is a downregulation of BRD2, as compared to a normal (e.g., non-diseased individual), or an individual with a less severe form of CD, such as CD1. In some cases, the transcriptomic risk signature is detected by detecting a level of gene expression product expressed from BRD2. In some cases, the transcriptomic risk signature is detected by detecting a presence of a SNP associated with the downregulation of BRD2. In some cases, the SNP is at is rs516535 and comprises an “A” allele, which is provided in SEQ ID NO: 320.

[0937] Systems disclosed herein comprise analyzing a sample obtained from a subject to detect a presence of a transcriptomic risk signature that is predictive of a severe form of CD characteristic of CD3, which in some cases involves detecting a level of HLA-DQA2. In some cases, the transcriptomic risk signature is a downregulation or upregulation of HLA-DQA2, as compared to a normal (e.g., non-diseased individual), or an individual with a less severe form of CD, such as CD1. In some cases, the transcriptomic risk signature is detected by detecting a level of gene expression product expressed from HLA-DQA2. In some cases, the transcriptomic risk signature is detected by detecting a presence of a SNP associated with the downregulation or the upregulation of AHLA-DQA2. In some cases, the SNP is at rs9276427 and comprises an “A’ allele, which is provided in SEQ ID NO: 351.

[0938] Systems disclosed herein comprise analyzing a sample obtained from a subject to detect a presence of a transcriptomic risk signature that is predictive of a severe form of CD characteristic of CD3, which in some cases involves detecting a level of KIF21B. In some cases, the transcriptomic risk signature is an upregulation of KIF21B, as compared to a normal (e.g, non-diseased individual), or an individual with a less severe form of CD, such as CD1. In some cases, the transcriptomic risk signature is detected by detecting a level of gene expression product expressed from KIF21B. In some cases, the transcriptomic risk signature is detected by detecting a presence of a SNP associated with the upregulation of KIF21B. In some cases, the SNP is at rs296564 and comprises an “A” allele, which is provided in SEQ ID NO: 323. In some cases, the SNP is at rs296569 and comprises a “A” allele, which is provided in SEQ ID NO: 331. In some cases, the SNP is and comprises an “A” allele, which is provided in SEQ ID NO: 332. In some cases, the SNP is at rs296567 and comprises a “G” allele, which is provided in SEQ ID NO: 333. In some cases, the SNP is at rs296561 and comprises a “G” allele, which is provided in SEQ ID NO: 334. In some cases, the SNP is at rs72749142 and comprises a “G” allele, which is provided in SEQ ID NO: 389.

[0939] Systems disclosed herein comprise analyzing a sample obtained from a subject to detect a presence of a transcriptomic risk signature that is predictive of a severe form of CD characteristic of CD3, which in some cases involves detecting a level of PCDH7. In some cases, the transcriptomic risk signature is a downregulation of PCDH7, as compared to anormal (e.g, non-diseased individual), or an individual with a less severe form of CD, such as CD1. In some cases, the transcriptomic risk signature is detected by detecting a level of gene expression product expressed from PCDH7. In some cases, the transcriptomic risk signature is detected by detecting a presence of a SNP associated with the downregulation of PCDH7. In some cases, the SNP is at rs9291547 and comprises an “A” allele, which is provided in SEQ ID NO: 255.

[0940] Systems disclosed herein comprise analyzing a sample obtained from a subject to detect a presence of a transcriptomic risk signature that is predictive of a severe form of CD characteristic of CD3, which in some cases involves detecting a level of ANK3. In some cases, the transcriptomic risk signature is a downregulation of ANK3, as compared to a normal (e.g., non-diseased individual), or an individual with a less severe form of CD, such as CD1. In some cases, the transcriptomic risk signature is detected by detecting a level of gene expression product expressed from ANK3. In some cases, the transcriptomic risk signature is detected by detecting a presence of a SNP associated with the downregulation of ANK. In some cases, the SNP is at rs10761532 and comprises an “A” allele, which is provided in SEQ ID NO: 194. In some cases, the SNP is at rs10821813 and comprises an “A” allele, which is provided in SEQ ID NO: 195. In some cases, the SNP is at rs1561852 and comprises a “C” allele, which is provided in SEQ ID NO: 196. In some cases, the SNP is at rs10994464 and comprises an “A” allele, which is provided in SEQ ID NO: 204. In some cases, the SNP is at rs993402 and comprises a “G” allele, which is provided in SEQ ID NO: 205. In some cases, the SNP is at rs10994467 and comprises an “A” allele, which is provided in SEQ ID NO: 206. In some cases, the SNP is at rs10821822 and comprises an “A” allele, which is provided in SEQ ID NO: 207. In some cases, the SNP is at rs1837949 and comprises a “G” allele, which is provided in SEQ ID NO: 208. In some cases, the SNP is at rs35597961 and comprises a “C” allele, which is provided in SEQ ID NO: 209. In some cases, the SNP is at rs10821830 and comprises a “G” allele, which is provided in SEQ ID NO: 210. In some cases, the SNP is at rs975262 and comprises an “A” allele, which is provided in SEQ ID NO: 211. In some cases, the SNP is at rs973067 and comprises an “A” allele, which is provided in SEQ ID NO: 212. In some cases, the SNP is at rs10509139 and comprises a “G” allele, which is provided in SEQ ID NO: 213. In some cases, the SNP is at rs1442539 and comprises an “A” allele, which is provided in SEQ ID NO: 214. In some cases, the SNP is at rs2197155 and comprises an “A” allele, which is provided in SEQ ID NO: 215. In some cases, the SNP is at rs7919914 and comprises a “G” allele, which is provided in SEQ ID NO: 216. In some cases, the SNP is at rs10994476 and comprises a “G” allele, which is provided in SEQ ID NO: 275. In some cases, the SNP is at rs35471473 and comprises an “A” allele, which is provided in SEQ ID NO: 243. In some cases, the SNP is at rs12785023 and comprises a “G” allele, which is provided in SEQ ID NO: 244. In some cases, the SNP is at rs12783716 and comprises a “G” allele, which is provided in SEQ ID NO: 245. In some cases, the SNP is at rs10821821 and comprises a “G” allele, which is provided in SEQ ID NO: 246. In some cases, the SNP is at rs10994441 and comprises a “G” allele, which is provided in SEQ ID NO: 284. In some cases, the SNP is at rs10994442 and comprises a “C” allele, which is provided in SEQ ID NO: 285. In some cases, the SNP is at rs10821814 and comprises a “T” allele, which is provided in SEQ ID NO: 286. In some cases, the SNP is at rs10994465 and comprises an “A” allele, which is provided in SEQ ID NO: 287. In some cases, the SNP is at rs12218617 and comprises a “T” allele, which is provided in SEQ ID NO: 288. In some cases, the SNP is at rs10509138 and comprises a “C” allele, which is provided in SEQ ID NO: 289. In some cases, the SNP is at rs61854518 and comprises an “A” allele, which is provided in SEQ ID NO: 290. In some cases, the SNP is at rs10821699 and comprises a “G” allele, which is provided in SEQ ID NO: 345. In some cases, the SNP is at rs7919274 and comprises a “G” allele, which is provided in SEQ ID NO: 352. In some cases, the SNP is at rs10761552 and comprises an “A” allele, which is provided in SEQ ID NO: 368. In some cases, the SNP is at rs17037425 and comprises a “G” allele, which is provided in SEQ ID NO: 369. In some cases, the SNP is at rs2893861 and comprises an “A” allele, which is provided in SEQ ID NO: 370. In some cases, the SNP is at rs1993939 and comprises a “C” allele, which is provided in SEQ ID NO: 371. In some cases, the SNP is at rs10821833 and comprises a “G” allele, which is provided in SEQ ID NO: 372. In some cases, the SNP is at rs1904418 and comprises a “G” allele, which is provided in SEQ ID NO: 373. In some cases, the SNP is at rs16915196 and comprises a “G” allele, which is provided in SEQ ID NO: 432. In some cases, the SNP is at rs61853514 and comprises an “A” allele, which is provided in SEQ ID NO: 433. In some cases, the SNP is at rs10994430 and comprises an “A” allele, which is provided in SEQ ID NO: 434. In some cases, the SNP is at rs16915231 and comprises an “A” allele, which is provided in SEQ ID NO: 435. In some cases, the SNP is at rs2028564 and comprises a “G” allele, which is provided in SEQ ID NO: 436.

[0941] Systems disclosed herein comprise analyzing a sample obtained from a subject to detect a presence of a transcriptomic risk signature that is predictive of a severe form of CD characteristic of CD3, which in some cases involves detecting a level of TRIM38. In some cases, the transcriptomic risk signature is a downregulation of TRIM38, as compared to a normal (e.g., non-diseased individual), or an individual with a less severe form of CD, such as CD1. In some cases, the transcriptomic risk signature is detected by detecting a level of gene expression product expressed from TRIM38. In some cases, the transcriptomic risk signature is detected by detecting a presence of a SNP associated with the downregulation of TRIM38. In some cases, the SNP is at rs13196552 and comprises a “G” allele, which is provided in SEQ ID NO: 237. In some cases, the SNP is at rs17587597 and comprises an “A” allele, which is provided in SEQ ID NO: 282. In some cases, the SNP is at rs17587226 and comprises an “A” allele, which is provided in SEQ ID NO: 301.

[0942] Systems disclosed herein comprise analyzing a sample obtained from a subject to detect a presence of a transcriptomic risk signature that is predictive of a severe form of CD characteristic of CD3, which in some cases involves detecting a level of CYP4V2. In some cases, the transcriptomic risk signature is a downregulation of CYP4V2, as compared to a normal (e.g., non-diseased individual), or an individual with a less severe form of CD, such as CD1. In some cases, the transcriptomic risk signature is detected by detecting a level of gene expression product expressed from CYP4V2. In some cases, the transcriptomic risk signature is detected by detecting a presence of a SNP associated with the downregulation of CYP4V2. In some cases, the SNP is at rs2276917 and comprises an “A” allele, which is provided in SEQ ID NO: 200. In some cases, the SNP is at rs10013653 and comprises an “A” allele, which is provided in SEQ ID NO: 312.

[0943] Systems disclosed herein comprise analyzing a sample obtained from a subject to detect a presence of a transcriptomic risk signature that is predictive of a severe form of CD characteristic of CD3, which in some cases involves detecting a level of VAMP3. In some cases, the transcriptomic risk signature is a downregulation of VAMP3, as compared to a normal (e.g., non-diseased individual), or an individual with a less severe form of CD, such as CD1. In some cases, the transcriptomic risk signature is detected by detecting a level of gene expression product expressed from VAMP3. In some cases, the transcriptomic risk signature is detected by detecting a presence of a SNP associated with the downregulation of VAMP3. In some cases, the SNP is at rs11582799 and comprises an “A” allele, which is provided in SEQ ID NO: 222. In some cases, the SNP is at rs111692854 and comprises an “A” allele, which is provided in SEQ ID NO: 223. In some cases, the SNP is at rs72632053 and comprises an “A” allele, which is provided in SEQ ID NO: 224.

[0944] In some embodiments, disclosed herein is a system for treating an inflammatory disease in a subject, comprising: (a) a computer processing device, optionally connected to a computer network; and (b) a software module executed by the computer processing device to analyze genes or gene products described above, and provided in Table 1, Table 2, and/or Table 3 and/or Table 4, in a sample obtained from a subject. In some embodiments, a risk genotype comprising one or more polymorphisms in Tables 1 and/or Table 2 is analyzed. In some embodiments, any group of polymorphisms from Tables 1 and/or Table 2 are analyzed In some instances, the system comprises a central processing unit (CPU), memory (e.g., random access memory, flash memory), electronic storage unit, computer program, communication interface to communicate with one or more other systems, and any combination thereof. In some instances, the system is coupled to a computer network, for example, the Internet, intranet, and/or extranet that is in communication with the Internet, a telecommunication, or data network. In some embodiments, the system comprises a storage unit to store data and information regarding any aspect of the methods described in this disclosure. Various aspects of the system are a product or article or manufacture.

[0945] One feature of a computer program includes a sequence of instructions, executable in the digital processing device's CPU, written to perform a specified task. In some embodiments, computer readable instructions are implemented as program modules, such as functions, features, Application Programming Interfaces (APIs), data structures, and the like, that perform particular tasks or implement particular abstract data types. In light of the disclosure provided herein, those of skill in the art will recognize that a computer program may be written in various versions of various languages.

[0946] The functionality of the computer readable instructions are combined or distributed as desired in various environments. In some instances, a computer program comprises one sequence of instructions or a plurality of sequences of instructions. A computer program may be provided from one location. A computer program may be provided from a plurality of locations. In some embodiment, a computer program includes one or more software modules. In some embodiments, a computer program includes, in part or in whole, one or more web applications, one or more mobile applications, one or more standalone applications, one or more web browser plug-ins, extensions, add-ins, or add-ons, or combinations thereof.

### Web Application

[0947] In some embodiments, a computer program includes a web application. In light of the disclosure provided herein, those of skill in the art will recognize that a web application may utilize one or more software frameworks and one or more database systems. A web application, for example, is created upon a software framework such as Microsoft® .NET or Ruby on Rails (RoR). A web application, in some instances, utilizes one or more database systems including, by way of non-limiting examples, relational, non-relational, feature oriented, associative, and XML database systems. Suitable relational database systems include, by way of non-limiting examples, Microsoft® SQL Server, mySQL™, and Oracle®. Those of skill in the art will also recognize that a web application may be written in one or more versions of one or more languages. In some embodiments, a web application is written in one or more markup languages, presentation definition languages, client-side scripting languages, server-side coding languages, database query languages, or combinations thereof. In some embodiments, a web application is written to some extent in a markup language such as Hypertext Markup Language (HTML), Extensible Hypertext Markup Language (XHTML), or eXtensible Markup Language (XML). In some embodiments, a web application is written to some extent in a presentation definition language such as Cascading Style Sheets (CSS). In some embodiments, a web application is written to some extent in a client-side scripting language such as Asynchronous Javascript and XML (AJAX), Flash® Actionscript, Javascript, or Silverlight®. In some embodiments, a web application is written to some extent in a server-side coding language such as Active Server Pages (ASP), ColdFusion®, Perl, Java™, JavaServer Pages (JSP), Hypertext Preprocessor (PHP), Python™, Ruby, Tcl, Smalltalk, WebDNA®, or Groovy. In some embodiments, a web application is written to some extent in a database query language such as Structured Query Language (SQL). A web application may integrate enterprise server products such as IBM® Lotus Domino®. A web application may include a media player element. A media player element may utilize one or more of many suitable multimedia technologies including, by way of non-limiting examples, Adobe® Flash®, HTML 5, Apple® QuickTime®, Microsoft® Silverlight®, Java™, and Unity®.

### Mobile Application

[0948] In some instances, a computer program includes a mobile application provided to a mobile digital processing device. The mobile application may be provided to a mobile digital processing device at the time it is manufactured. The mobile application may be provided to a mobile digital processing device via the computer network described herein.

[0949] A mobile application is created by techniques known to those of skill in the art using hardware, languages, and development environments known to the art. Those of skill in the art will recognize that mobile applications may be written in several languages. Suitable programming languages include, by way of non-limiting examples, C, C++, C#, Featureive-C, Java™, Javascript, Pascal, Feature Pascal, Python™, Ruby, VB.NET, WML, and XHTML/HTML with or without CSS, or combinations thereof.

[0950] Suitable mobile application development environments are available from several sources. Commercially available development environments include, by way of non-limiting examples, AirplaySDK, alcheMo, Appcelerator®, Celsius, Bedrock, Flash Lite, NET Compact Framework, Rhomobile, and WorkLight Mobile Platform. Other development environments may be available without cost including, by way of non-limiting examples, Lazarus, MobiFlex, MoSync, and Phonegap. Also, mobile device manufacturers distribute software developer kits including, by way of non-limiting examples, iPhone and iPad (iOS) SDK, Android™ SDK, BlackBerry® SDK, BREW SDK, Palm® OS SDK, Symbian SDK, webOS SDK, and Windows® Mobile SDK.

[0951] Those of skill in the art will recognize that several commercial forums are available for distribution of mobile applications including, by way of non-limiting examples, Apple® App Store, Android™ Market, BlackBerry® App World, App Store for Palm devices, App Catalog for webOS, Windows® Marketplace for Mobile, Ovi Store for Nokia® devices, Samsung® Apps, and Nintendo® DSi Shop.

### Standalone Application

[0952] In some embodiments, a computer program includes a standalone application, which is a program that may be run as an independent computer process, not an add-on to an existing process, e.g., not a plug-in. Those of skill in the art will recognize that standalone applications are sometimes compiled. In some instances, a compiler is a computer program(s) that transforms source code written in a programming language into binary feature code such as assembly language or machine code. Suitable compiled programming languages include, by way of non-limiting examples, C, C++, Featureive-C, COBOL, Delphi, Eiffel, Java™, Lisp, Python™, Visual Basic, and VB .NET, or combinations thereof. Compilation may be often performed, at least in part, to create an executable program. In some instances, a computer program includes one or more executable complied applications.

### Web Browser Plug-In

[0953] A computer program, in some aspects, includes a web browser plug-in. In computing, a plug-in, in some instances, is one or more software components that add specific functionality to a larger software application. Makers of software applications may support plug-ins to enable third-party developers to create abilities which extend an application, to support easily adding new features, and to reduce the size of an application. When supported, plug-ins enable customizing the functionality of a software application. For example, plug-ins are commonly used in web browsers to play video, generate interactivity, scan for viruses, and display particular file types. Those of skill in the art will be familiar with several web browser plug-ins including, Adobe@Flash® Player, Microsoft® Silverlight®, and Apple® QuickTime®. The toolbar may comprise one or more web browser extensions, add-ins, or add-ons. The toolbar may comprise one or more explorer bars, tool bands, or desk bands.

[0954] In view of the disclosure provided herein, those of skill in the art will recognize that several plug-in frameworks are available that enable development of plug-ins in various programming languages, including, by way of non-limiting examples, C++, Delphi, Java™, PHP, Python™, and VB NET, or combinations thereof.

[0955] In some embodiments, Web browsers (also called Internet browsers) are software applications, designed for use with network-connected digital processing devices, for retrieving, presenting, and traversing information resources on the World Wide Web. Suitable web browsers include, by way of non-limiting examples, Microsoft® Internet Explorer®, Mozilla® Firefox®, Google® Chrome, Apple® Safari®, Opera Software® Opera®, and KDE Konqueror. The web browser, in some instances, is a mobile web browser. Mobile web browsers (also called mircrobrowsers, mini-browsers, and wireless browsers) may be designed for use on mobile digital processing devices including, by way of non-limiting examples, handheld computers, tablet computers, netbook computers, subnotebook computers, smartphones, music players, personal digital assistants (PDAs), and handheld video game systems. Suitable mobile web browsers include, by way of non-limiting examples, Google® Android® browser, RIM BlackBerry® Browser, Apple® Safari®, Palm® Blazer, Palm® WebOS® Browser, Mozilla® Firefox® for mobile, Microsoft® Internet Explorer® Mobile, Amazon® Kindle® Basic Web, Nokia® Browser, Opera Software® Opera® Mobile, and Sony® PSP™ browser.

### Software Modules

[0956] The medium, method, and system disclosed herein comprise one or more softwares, servers, and database modules, or use of the same. In view of the disclosure provided herein, software modules may be created by techniques known to those of skill in the art using machines, software, and languages known to the art. The software modules disclosed herein may be implemented in a multitude of ways. In some embodiments, a software module comprises a file, a section of code, a programming feature, a programming structure, or combinations thereof. A software module may comprise a plurality of files, a plurality of sections of code, a plurality of programming features, a plurality of programming structures, or combinations thereof. By way of non-limiting examples, the one or more software modules comprises a web application, a mobile application, and/or a standalone application. Software modules may be in one computer program or application. Software modules may be in more than one computer program or application. Software modules may be hosted on one machine. Software modules may be hosted on more than one machine. Software modules may be hosted on cloud computing platforms. Software modules may be hosted on one or more machines in one location. Software modules may be hosted on one or more machines in more than one location.

### Databases

[0957] The medium, method, and system disclosed herein comprise one or more databases, or use of the same. In view of the disclosure provided herein, those of skill in the art will recognize that many databases are suitable for storage and retrieval of geologic profile, operator activities, division of interest, and/or contact information of royalty owners. Suitable databases include, by way of non-limiting examples, relational databases, non-relational databases, feature oriented databases, feature databases, entity-relationship model databases, associative databases, and XML databases. In some embodiments, a database is internet-based. In some embodiments, a database is web-based. In some embodiments, a database is cloud computing-based. A database may be based on one or more local computer storage devices.

### Data Transmission

[0958] The subject matter described herein, are configured to be performed in one or more facilities at one or more locations. Facility locations are not limited by country and include any country or territory. In some instances, one or more steps of a method herein are performed in a different country than another step of the method. In some instances, one or more steps for obtaining a sample are performed in a different country than one or more steps for analyzing a genotype of a sample. In some embodiments, one or more method steps involving a computer system are performed in a different country than another step of the methods provided herein. In some embodiments, data processing and analyses are performed in a different country or location than one or more steps of the methods described herein. In some embodiments, one or more articles, products, or data are transferred from one or more of the facilities to one or more different facilities for analysis or further analysis. An article includes, but is not limited to, one or more components obtained from a sample of a subject and any article or product disclosed herein as an article or product. Data includes, but is not limited to, information regarding genotype and any data produced by the methods disclosed herein. In some embodiments of the methods and systems described herein, the analysis is performed and a subsequent data transmission step will convey or transmit the results of the analysis.

[0959] In some embodiments, any step of any method described herein is performed by a software program or module on a computer. In additional or further embodiments, data from any step of any method described herein is transferred to and from facilities located within the same or different countries, including analysis performed in one facility in a particular location and the data shipped to another location or directly to an individual in the same or a different country. In additional or further embodiments, data from any step of any method described herein is transferred to and/or received from a facility located within the same or different countries, including analysis of a data input, such as cellular material, performed in one facility in a particular location and corresponding data transmitted to another location, or directly to an individual, such as data related to the diagnosis, prognosis, responsiveness to therapy, or the like, in the same or different location or country.

### V. EXEMPLARY EMBODIMENTS

[0960] (1) A method of inhibiting or reducing phosphodiesterase 4C (PDE4C) activity or expression in a subject having or suspected of having an inflammatory disease, the method comprising: (a) identifying the subject as being a carrier of a risk genotype and/or transcriptomic risk signature by: (i) obtaining, or having obtained, a sample from the subject; and (ii) assaying, or having assayed, to detect in the sample a presence of a risk genotype or transcriptomic risk signature; and (b) administering to the subject a therapeutically effective amount of an inhibitor of PDE4C activity or expression, thereby inhibiting or reducing PDE4C activity or expression in the subject. (2) A method of treating an inflammatory disease in a subject comprising administering a therapeutically effective amount of an inhibitor of PDE4C activity or expression to the subject, provided a risk genotype and/or transcriptomic risk signature was detected in a sample obtained from the subject. (3) A method of increasing adenylate cyclase 7 (ADCY7) activity or expression in a subject having or suspected of having an inflammatory disease, the method comprising: (a) identifying the subject as being a carrier of a risk genotype and/or transcriptomic risk signature by: (i) obtaining, or having obtained, a sample from the subject; and assaying, or having assayed, to detect in the sample a presence of a risk genotype or transcriptomic risk signature; and (ii) administering to the subject a therapeutically effective amount of an agonist of ADCY7, thereby increasing ADCY7 activity or expression in the subject. (4) The embodiment of 1-2, wherein the inhibitor of PDE4C activity or expression comprises a PDE4 antibody, or PDE4-binding antibody fragment. (5) The embodiment of 1-2, wherein inhibitor of PDE4C activity or expression comprises apremilast (6) The embodiment of 1-2, wherein the inhibitor of PDE4C activity or expression comprises a blocking anti-PDE4C antibody. (7) The embodiment of 1-2, wherein the inhibitor of PDE4C activity or expression comprises a small molecule that binds to PDE4C. (8) The embodiment of 1-2, wherein the inhibitor of PDE4C activity or expression comprises an allosteric modulator of PDE4C. (9) The embodiment of 3-4, wherein the agonist of ADCY7 comprises a partial agonist, or a full agonist (10) The embodiment of 3-4, wherein the agonist of ADCY7 comprises forskolin or colforsin daropate, or an analog thereof (11) The embodiment of 3-4, wherein the agonist of ADCY7 increases ADCY7 activity or expression in the subject directly or indirectly. (12) The embodiment of 3-4, wherein the agonist of ADCY7 comprises an ADCY7 antibody, or ADCY7-binding antibody fragment (13) The embodiment of 3-4, wherein the agonist of ADCY7 comprises a small molecule. (14) The embodiment of 3-4, wherein the agonist of ADCY7 comprises a polypeptide. (15) The embodiment of 3-4, wherein the agonist of ADCY7 comprises an allosteric modulator of ADCY7. (16) The method in any previous embodiment, the risk genotype comprises a polymorphism from Table 2. (17) The method in any previous embodiment, the transcriptomic risk signature comprises one or more genes from Table 3. (18) The method in any previous embodiment, the inflammatory disease comprises Inflammatory Bowel Disease (IBD), Crohn's disease (CD), ulcerative colitis (UC), rheumatoid arthritis (RA), multiple sclerosis (MS), psoriasis, chronic colitis, pancreatitis, leukopenia, chronic asthma, or a combination thereof (19) The method in any previous embodiment, the risk genotype and/or transcriptomic risk is associated with perianal Crohn's disease (pCD). (20) The method in any previous embodiment the risk genotype and/or transcriptomic risk signature is associated with a refractory CD. (21) The method in any previous embodiment, the subject is, or is suspected to be, non-responsive to anti-TNF alphatherapy, anti-a4-b7 therapy (vedolizumab), anti-IL12p40 therapy (ustekinumab), Thalidomide, or Cytoxin, or a combination thereof (22) The method in any previous embodiment, the risk genotype is associated with an increase or a decrease in gene expression of a gene in the adenosine monophosphate (cAMP) pathway. (23) The method in any previous embodiment, the risk genotype is associated with an increase or decrease in gene expression of a gene comprising PDE4C, ADCY7, intercellular adhesion molecule 3 (ICAM3), SMAD Family Member 3 (SMAD3), or Interleukin 18 Binding Protein (IL18BP), or a combination thereof (24) The method in any previous embodiment, the increase or decrease in gene expression comprises a 1-fold, 1.2-fold, 1.3-fold, 1.4-fold, 1.5 fold, 1.6-fold, 1.7-fold, 1.8-fold, 1.9-fold, 2.0-fold, 2.1-fold, 2.2-fold, 2.3-fold, 2.4-fold, 2.5-fold, 2.6-fold, 2.7-fold, 2.8-fold, 2.0-fold, 3.0-fold, 3.1-fold, 3.2-fold, 3.3-fold, 3.4-fold, 3.5-fold, 4-fold, 5-fold, 10-fold, 20-fold, 30-fold, 40-fold, 50-fold, or more, increase or decrease between the sample obtained from the subject and a gene expression in an individual who does not express the risk genotype. (25) The method in any previous embodiment, the risk genotype is associated with and increase or decrease in gene expression of a gene from any one of Tables 1-3. (26) The method in any previous embodiment, the polymorphism is detected by using an assay comprising DNA sequencing, a genotyping array, allelic discrimination, restriction fragment length polymorphism analysis, allele-specific oligonucleotide hybridization, heteroduplex mobility assay, single strand conformational polymorphism, or denaturing gradient gel electrophoresis, or any combination thereof. (27) The method in any previous embodiment, the subject has been determined to be a carrier of the risk genotype by a process comprising contacting the sample obtained from the subject comprising genetic material from the subject with a nucleic acid sequence capable of hybridizing to at least 10 contiguous nucleobases of a sequence corresponding to a polymorphism from Table 2 under standard hybridization conditions, wherein the at least 10 contiguous nucleobases comprises a risk allele. (28) The method in any previous embodiment, the subject has been determined to be a carrier of the transcriptomic risk signature by a process comprising contacting the sample obtained from the subject comprising genetic material from the subject with a nucleic acid sequence capable of hybridizing to at least 10 contiguous nucleobases of a sequence corresponding to a gene from Table 3 under standard hybridization conditions. (29) The method in any previous embodiment, the standard hybridization conditions comprise an annealing temperature between about 35° C. and about 65° C. (30) The method in any previous embodiment, the standard hybridization conditions are performed with a TaqMan master mix solution. (31) The method in any previous embodiment, the nucleic acid sequence is conjugated to a detectable molecule. (32) The method in any previous embodiment the detectable molecule comprises a fluorophore. (33) The method in any previous embodiment the nucleic acid sequence is conjugated to a quencher. (34) The method in any previous embodiment, the sample obtained from the subject comprises genetic material from the subject that is amplified using a nucleic acid amplification assay. (35) The method in any previous embodiment the nucleic acid amplification assay comprises amplification of DNA from the subject with a pair of primers capable of amplifying at least 15 contiguous nucleobases of the sequence corresponding to the polymorphism from Table 2, wherein one of the nucleobases within the sequence that is amplified comprises the risk allele. (36) In any previous embodiment, the nucleic acid amplification assay comprises amplification of DNA from the subject with a pair of primers capable of amplifying at least 15 contiguous nucleobases of the sequence corresponding to the gene from Table 3. (37) The method in any previous embodiment, the sample obtained from the subject comprises whole blood, blood plasma, blood serum, cheek swab, urine, saliva, or tissue. (38) The method in any previous embodiment the subject is a mammal. (39) The method in any previous embodiment, the subject is a human. (40) The method in any previous embodiment, the subject is susceptible to, or is inflicted with, thiopurine toxicity, or a disease caused by thiopurine toxicity. In any previous embodiment, the subject is non-responsive to a therapy comprising anti-TNF alpha therapy, anti-a4-b7 therapy (vedolizumab), anti-IL12p40 therapy (ustekinumab), Thalidomide, or Cytoxin. (41) A method of characterizing an inflammatory bowel disease of a subject, the method comprising: (a) assaying a sample comprising genetic material obtained from a subject with an inflammatory disease to detect a presence or an absence of a risk genotype and/or a transcriptomic risk signature; and (b) characterizing the inflammatory disease as severe and/or refractory, provided the presence of the risk genotype and/or transcriptomic risk signature is detected in (a). (42) The method of embodiment 41, further comprising administering a therapeutically effective amount of an active agent to the subject, provided the inflammatory disease is characterized as severe and/or refractory in step (b). (43) The method of embodiment 42, wherein the subject is selected for treatment at least in part because the subject suffers, or is suspected to suffer, from non-response to anti-TNF alpha therapy, anti-a4-b7 therapy (vedolizumab), anti-IL12p40 therapy (ustekinumab), Thalidomide, or Cytoxin, or a combination thereof (44) The method of embodiments 42-43, wherein the active agent comprises an inhibitor of PDE4C activity or expression, and/or agonist of ADCY7, or combination thereof (45) The method of embodiment 44, wherein the agonist of ADCY7 comprises a partial agonist, or a full agonist. (46) The method of embodiment 44, wherein the agonist of ADCY7 increases ADCY7 activity or expression in the subject directly or indirectly. (47) The method of embodiment 44, wherein the agonist of ADCY7 comprises an ADCY7 antibody, or ADCY7-binding antibody fragment. (48) The method of embodiment 44, wherein the agonist of ADCY7 comprises a small molecule. (49) The method of embodiment 44, wherein the agonist of ADCY7 comprises a polypeptide. (50) The method of embodiment 44, wherein the agonist of ADCY7 comprises an allosteric modulator of ADCY7. (51) The method of embodiment 44, wherein the inhibitor of PDE4C activity or expression comprises a PDE4C antibody, or PDE4C-binding antibody fragment. (52) The method of embodiment 44, wherein the inhibitor of PDE4C activity or expression comprises apremilast. (53) The method of embodiment 44, wherein the inhibitor of PDE4C activity or expression comprises a blocking anti-PDE4C antibody. (54) The method of embodiment 44, wherein the inhibitor of PDE4C activity or expression comprises a small molecule that binds to PDE4C. (55) The method of embodiment 44, wherein the inhibitor of PDE4C activity or expression comprises an allosteric modulator of PDE4C. (56) In any previous embodiment, the sample obtained from the subject comprises whole blood, blood plasma, blood serum, cheek swab, urine, saliva, or tissue. (57) In any previous embodiment, the subject is a mammal. (58) The method in any previous embodiment, the subject is a human. (59) The method in any previous embodiment, the subject is susceptible to, or is inflicted with, thiopurine toxicity, or a disease caused by thiopurine toxicity. In any previous embodiment, the subject is, or is suspected to be, non-responsive to a therapy comprising anti-TNF alpha therapy, anti-a4-b7 therapy (vedolizumab), anti-IL12p40 therapy (ustekinumab), Thalidomide, or Cytoxin. (60) The method in any previous embodiment the risk genotype comprises a polymorphism from Table 2. (61) The method in any previous embodiment, the transcriptomic risk signature comprises one or more genes from Table 1. (62) The method in any previous embodiment, the inflammatory disease is selected from the group consisting of Inflammatory Bowel Disease (IBD), Crohn's disease (CD), ulcerative colitis (UC), rheumatoid arthritis (RA), multiple sclerosis (MS), psoriasis, chronic colitis, pancreatitis, leukopenia, chronic asthma, and a combination thereof (63) The method in any previous embodiment, the risk genotype and/or the transcriptomic risk signature is associated with perianal Crohn's disease (pCD). (64) The method in any previous embodiment, the risk genotype and/or transcriptomic risk signature is associated with refractory CD. (65) The method in any previous embodiment, the risk genotype is associated with an increase or a decrease in gene expression of a gene in the adenosine monophosphate (cAMP) pathway. (66) The method of embodiment 65, wherein the gene comprises PDE4C, ADCY7, or a combination thereof (67) The method of embodiment 65, wherein the increase or decrease in gene expression comprises a 1-fold, 1.2-fold, 1.3-fold, 1.4-fold, 1.5 fold, 1.6-fold, 1.7-fold, 1.8-fold, 1.9-fold, 2.0-fold, 2.1-fold, 2.2-fold, 2.3-fold, 2.4-fold, 2.5-fold, 2.6-fold, 2.7-fold, 2.8-fold, 2.0-fold, 3.0-fold, 3.1-fold, 3.2-fold, 3.3-fold, 3.4-fold, 3.5-fold, 4-fold, 5-fold, 10-fold, 20-fold, 30-fold, 40-fold, 50-fold, or more, increase or decrease between the sample obtained from the subject and a gene expression in an individual who does not express the risk genotype. (68) A composition comprising: (a) a nucleic acid sequence comprising at least 10 but less than 50 contiguous nucleobases of any one of SEQ ID NOS: 1-439 that comprises a nucleobase provided in the [bracketed] position within any one of SEQ ID NOS: 1-439; and (ii) a detectable moiety conjugated to the nucleic acid sequence. (69) The composition of embodiment 68, wherein the detectable molecule is a fluorophore. (70) The composition of embodiment 68, wherein the contiguous nucleobase residues are connected to a quencher. (71) A kit comprising the composition of embodiment 68 and a primer pair capable of amplifying the nucleic acid sequence, or reverse complement sequence thereof. (72) A method comprising contacting DNA from a subject with the composition of embodiment 68 using the kit of embodiment 71 under conditions suitable to hybridize the composition to the DNA if the DNA comprises a sequence complementary to the composition. (73) The method of embodiment 72, further comprising administering a therapeutically effective amount of an active agent to the subject. (74) The method of embodiment 42, wherein the subject is selected for treatment at least in part because the subject suffers, or is suspected to suffer, from non-response to anti-TNF alpha therapy, anti-a4-b7 therapy (vedolizumab), anti-IL12p40 therapy (ustekinumab), Thalidomide, or Cytoxin, or a combination thereof (75) The method of embodiments 72-74, wherein the active agent comprises an inhibitor of PDE4C activity or expression, and/or agonist of ADCY7, or combination thereof. (76) The method of embodiment 72-75, wherein the agonist of ADCY7 comprises a partial agonist, or a full agonist. (77) The method of embodiment 75, wherein the agonist of ADCY7 increases ADCY7 activity or expression in the subject directly or indirectly. (78) The method of embodiment 75, wherein the agonist of ADCY7 comprises an ADCY7 antibody, or ADCY7-binding antibody fragment. (79) The method of embodiment 75, wherein the agonist of ADCY7 comprises a small molecule. (80) The method of embodiment 75, wherein the agonist of ADCY7 comprises a polypeptide. (81) The method of embodiment 75, wherein the agonist of ADCY7 comprises an allosteric modulator of ADCY7. (82) The method of embodiment 75, wherein the inhibitor of PDE4C activity or expression comprises a PDE4C antibody, or PDE4C-binding antibody fragment. (83) The method of embodiment 75, wherein the inhibitor of PDE4C activity or expression comprises apremilast. (84) The method of embodiment 75, wherein the inhibitor of PDE4C activity or expression comprises a blocking anti-PDE4C antibody. (85) The method of embodiment 75, wherein the inhibitor of PDE4C activity or expression comprises a small molecule that binds to PDE4C. (86) The method of embodiment 75, wherein the inhibitor of PDE4C activity or expression comprises an allosteric modulator of PDE4C. (87) The method of any previous embodiment, the sample obtained from the subject comprises whole blood, blood plasma, blood serum, cheek swab, urine, saliva, or tissue. (88) In any previous embodiment, the subject is a mammal. (89) The method in any previous embodiment the subject is a human. (90) The method in any previous embodiment, the subject is susceptible to, or is inflicted with, thiopurine toxicity, or a disease caused by thiopurine toxicity. (91) The method of any previous embodiment, the subject is, or is suspected to be, non-responsive to a therapy comprising anti-TNF alpha therapy, anti-a4-b7 therapy (vedolizumab), anti-IL12p40 therapy (ustekinumab), Thalidomide, or Cytoxin. The method of any previous embodiment, wherein the risk genotype comprises one or more of an “A” at rs7958372, a “C” at rs2877453, an “A” at rs71327010, a “C” at rs1169302C, a “G” at rs1169303, an “A” at rs6519183, a “C” at rs685548, an “A” at rs11998187, an “A” at rs531819A, a “G” at rs1041968, a “G” at rs693, an “A” at rs512535, a “G” at rs550619G, an “A” at rs570877, a “G” at rs12713956, an “A” at rs2301723, an “A” at rs2499714, an “A” at rs6583176, an “A” at rs369880, a “G” at rs57884093, an “A” at rs989690, an “A” at rs7704116, an “A” at rs12984273, a “G” at rs16891235, a “C” at rs7296651, an “A” at is rs516535, an “A” at rs9276427, an “A” at rs296564, an “A” at rs296569, an “A” at rs296568, a “G” at rs296567, a “G” at rs296561, a “G” at rs72749142, an “A” at rs9291547, an “A” at rs10761532, an “A” at rs10821813, a “C” at rs1561852, an “A” at rs10994464, a “G” at rs993402, an “A” at rs10994467, an “A” at rs10821822, a “G” at rs1837949, a “C” at rs35597961, a “G” at rs10821830, an “A” at rs975262, an “A” at rs973067, a “G” at rs10509139, an “A” at rs1442539, an “A” at rs2197155, a “G” at rs7919914, a “G” at rs10994476, an “A” at rs35471473, a “G” at rs12785023, a “G” at rs12783716, a “G” at rs10821821, a “G” at rs10994441, a “C” at rs10994442, a “T” at rs10821814, an “A” at rs10994465, a “T” at rs12218617, a “C” at rs10509138, an “A” at rs61854518, a “G” at rs10821699, a “G” at rs7919274, an “A” at rs10761552, a “G” at rs17037425, an “A” at rs2893861, a “C” at rs1993939, a “G” at rs10821833, a “G” at rs1904418, a “G” rs16915196, an “A” at rs61853514, an “A” at rs10994430, an “A” at rs16915231, a “G” at rs2028564, a “G” at rs13196552, an “A” at rs17587597, an “A” at rs17587226, an “A” at rs2276917, an “A” at rs10013653, an “A” at rs11582799, an “A” at rs111692854, and an “A” at rs72632053. (92) The method of embodiment 92, wherein the risk genotype is associated with an upregulation or a downregulation of a gene selected from the group consisting of tyrosine phosphatase, non-receptor type 11 (PTPN11), ribosomal protein (RPL30), X-C motif chemokine receptor 1 (XCR1), HNF1 homeobox A (HNF1), ribosomal protein L3 (RPL3), cholinergic receptor muscarinic 3 (CHRM3), DLC1 Rho GTPase activating protein (DLC1), apolipoprotein B (APOB), ribosomal protein L6 (RPL6), glutamate metabotropic receptor 4 (GRM4), p21 (RAC1) activated kinase 2 (PAK2), ribosomal protein L18 (RPL18), phosphodiesterase 4C (PDE4C), protein kinase C alpha (PRKCA), protein phosphatase 2 catalytic subunit alpha (PPP2CA), phosphatidylinositol-4-phosphate 5-kinase type 1 gamma (PIP5K1C), histone cluster 1 H1 family member A (HIST1H1A), Aldehyde Dehydrogenase 2 Family Member (ALDH2), bromodomain containing 2 (BRD2), major histocompatibility complex, class II, DQ alpha 2 (HLA-DQA2), kinesin family member 21B (KIF21B), Protocadherin 7 (PCDH7), Ankyrin 3 (ANK3), Tripartite Motif Containing 38 (TRIM38), Cytochrome P450 Family 4 Subfamily V Member 2 (CYP4V2), Vesicle Associated Membrane Protein 3 (VAMP3), which is associated with a severe form of CD characteristic of CD3.

### VI. DEFINITIONS

[0961] Unless defined otherwise, all terms of art, notations and other technical and scientific terms or terminology used herein are intended to have the same meaning as is commonly understood by one of ordinary skill in the art to which the claimed subject matter pertains. In some cases, terms with commonly understood meanings are defined herein for clarity and/or for ready reference, and the inclusion of such definitions herein should not necessarily be construed to represent a substantial difference over what is generally understood in the art.

[0962] Throughout this application, various embodiments may be presented in a range format. It should be understood that the description in range format is merely for convenience and brevity and should not be construed as an inflexible limitation on the scope of the disclosure. Accordingly, the description of a range should be considered to have specifically disclosed all the possible subranges as well as individual numerical values within that range. For example, description of a range such as from 1 to 6 should be considered to have specifically disclosed subranges such as from 1 to 3, from 1 to 4, from 1 to 5, from 2 to 4, from 2 to 6, from 3 to 6 etc., as well as individual numbers within that range, for example, 1, 2, 3, 4, 5, and 6. This applies regardless of the breadth of the range.

[0963] As used in the specification and claims, the singular forms “a”, “an” and “the” include plural references unless the context clearly dictates otherwise. For example, the term “a sample” includes a plurality of samples, including mixtures thereof.

[0964] The terms “determining,” “measuring,” “evaluating,” “assessing,” “assaying,” and “analyzing” are often used interchangeably herein to refer to forms of measurement. The terms include determining if an element is present or not (for example, detection). These terms can include quantitative, qualitative or quantitative and qualitative determinations. Assessing can be relative or absolute. “Detecting the presence of” can include determining the amount of something present in addition to determining whether it is present or absent depending on the context.

[0965] As used herein, the terms “homologous,” “homology,” or “percent homology” when used herein to describe to an amino acid sequence or a nucleic acid sequence, relative to a reference sequence, can be determined using the formula described by Karlin and Altschul (Proc. Natl. Acad Sci. USA 87: 2264-2268, 1990, modified as in Proc. Natl. Acad. Sci. USA 90:5873-5877, 1993). Such a formula is incorporated into the basic local alignment search tool (BLAST) programs of Altschul et al. (J Mol Biol. 1990 Oct. 5; 215(3):403-10; Nucleic Acids Res. 1997 Sep. 1; 25(17):3389-402). Percent homology of sequences can be determined using the most recent version of BLAST, as of the filing date of this application. Percent identity of sequences can be determined using the most recent version of BLAST, as of the filing date of this application.

[0966] The terms “increased” or “increase” are used herein to generally mean an increase by a statically significant amount. In some embodiments, the terms “increased,” or “increase,” mean an increase of at least 10% as compared to a reference level, for example an increase of at least about 10%, at least about 20%, or at least about 30%, or at least about 40%, or at least about 50%, or at least about 60%, or at least about 70%, or at least about 80%, or at least about 90% or up to and including a 100% increase or any increase between 10-100% as compared to a reference level, standard, or control. Other examples of “increase” include an increase of at least 2-fold, at least 5-fold, at least 10-fold, at least 20-fold, at least 50-fold, at least 100-fold, at least 1000-fold or more as compared to a reference level.

[0967] The terms, “decreased” or “decrease” are used herein generally to mean a decrease by a statistically significant amount. In some embodiments, “decreased” or “decrease” means a reduction by at least 10% as compared to a reference level, for example a decrease by at least about 20%, or at least about 30%, or at least about 40%, or at least about 50%, or at least about 60%, or at least about 70%, or at least about 80%, or at least about 90% or up to and including a 100% decrease (e.g., absent level or non-detectable level as compared to a reference level), or any decrease between 10-100% as compared to a reference level. In the context of a marker or symptom, by these terms is meant a statistically significant decrease in such level. The decrease can be, for example, at least 10%, at least 20%, at least 30%, at least 40% or more, and is preferably down to a level accepted as within the range of normal for an individual without a given disease.

[0968] The terms “subject” encompass mammals. Non-limiting examples of mammal include, any member of the mammalian class: humans, non-human primates such as chimpanzees, and other apes and monkey species; farm animals such as cattle, horses, sheep, goats, swine; domestic animals such as rabbits, dogs, and cats; laboratory animals including rodents, such as rats, mice and guinea pigs, and the like. In one aspect, the mammal is a human. The term “animal” as used herein comprises human beings and non-human animals. In one embodiment, a “non-human animal” is a mammal, for example a rodent such as rat or a mouse. In some instances, a human subject is a “patient,” which as used herein, refers to a subject who may be diagnosed with a disease or condition disclosed herein.

[0969] The term “gene,” as used herein, refers to a segment of nucleic acid that encodes an individual protein or RNA (also referred to as a “coding sequence” or “coding region”), optionally together with associated regulatory region such as promoter, operator, terminator and the like, which may be located upstream or downstream of the coding sequence. A “genetic locus” referred to herein, is a particular location within a gene.

[0970] The term, “genotype” as disclosed herein, refers to the chemical composition of polynucleotide sequences within the genome of an individual. In some embodiments, the genotype comprises a single nucleotide polymorphism (SNP) or and indel (insertion or deletion, of a nucleobase within a polynucleotide sequence). In some embodiments, a genotype for a particular SNP, or indel is heterozygous. In some embodiments, a genotype for a particular SNP, or indel is homozygous.

[0971] A “polymorphism” as used herein refers to an aberration in (e.g, a mutation), or of (e.g., insertion/deletion), a nucleic acid sequence, as compared to the nucleic acid sequence in a reference population. In some embodiments, the polymorphism is common in the reference population. In some embodiments, the polymorphism is rare in the reference population.

[0972] The term, “single nucleotide polymorphism” or SNP as disclosed herein, refers to a variation in a single nucleotide within a polynucleotide sequence. The term should not be interpreted as placing a restriction on a frequency of the SNP in a given population. The variation of an SNP may have multiple different forms. A single form of an SNP is referred to as an “allele.” An SNP can be mono-, bi-, tri, or tetra-allelic. A SNP may include a “risk allele,” a “protective allele,” or neither. By way of example, a reference polynucleotide sequence reading 5′ to 3′ is TTACG. A SNP at allele position 3 (of 5′-TTACG-3′) comprise a substitution of the reference allele, “A” to a non-reference allele, “C.” If the “C” allele of the SNP is associated with an increased probability of developing a phenotypic trait, the allele is considered a “risk” allele. However, the same SNP may also comprise a substitution of the “A” allele to a “T” allele at position 3. If the T allele of the SNP is associated with a decreased probability of developing a phenotypic trait, the allele is considered a “protective” allele. The SNP may be observed in at least 1% of a given population. In some embodiments, the SNP is represented by an “rs” number, which refers to the accession of reference cluster of one more submitted SNPs in the dbSNP bioinformatics database as of the filing date of this patent application, and which is included within a sequence that comprises the total number of nucleobases from 5′ to 3′. In some embodiments, a SNP may be further defined by the position of the SNP (nucleobase) within the dbSNP sequence, the position of which is always with reference to 5′ length of the sequence plus 1. In some embodiments, a SNP is defined as the genomic position in a reference genome and the allele change (e.g. chromosome 7 at position 234,123,567 from G allele to A allele in the reference human genome build 37). In some embodiments, the SNV is defined as the genomic position identified with [brackets] or an “N” in a sequence disclosed herein.

[0973] The term, “indel,” as disclosed herein, refers to an insertion, or a deletion, of a nucleobase within a polynucleotide sequence. An indel can be mono-, bi-, tri, or tetra-allelic. An indel may be “risk,” a “protective,” or neither, for a phenotypic trait. In some embodiments, the indel is represented by an “rs” number, which refers to the accession of reference cluster of one more submitted indels in the dbSNP bioinformatics database as of the filing date of this patent application, and which is included in a sequence that comprises the total number of nucleobases from 5′ to 3′. In some embodiments, an indel may be further defined by the position of the insertion/deletion within the dbSNP sequence, the position of which is always with reference to the 5′ length of the sequence plus 1. In some embodiments, an indel is defined as the genomic position in a reference genome and the allele change. In some embodiments, the indel is defined as the genomic position identified with [brackets] or an “N” in a sequence disclosed herein.

[0974] “Haplotype” as used herein, encompasses a group of one or more genotypes, which tend to be inherited together in a reference population. In some embodiments, a haplotype comprises particular polymorphism or another polymophism in linkage disequilibrium (LD) therewith.

[0975] “Linkage disequilibrium,” or “LD,” as used herein refers to the non-random association of alleles or indels in different gene loci in a given population. LD may be defined by a D′ value corresponding to the difference between an observed and expected allele or indel frequencies in the population (D=Pab-PaPb), which is scaled by the theoretical maximum value of D. LD may be defined by an r² value corresponding to the difference between an observed and expected unit of risk frequencies in the population (D=Pab-PaPb), which is scaled by the individual frequencies of the different loci. In some embodiments, D′ comprises at least 0.20. In some embodiments, r² comprises at least 0.70.

[0976] The term “medically refractory,” or “refractory,” as used herein, refers to the failure of a standard treatment to induce remission of a disease. In some embodiments, the disease comprises an inflammatory disease disclosed herein. A non-limiting example of refractory inflammatory disease includes refractory Crohn's disease, and refractory ulcerative colitis (e.g, mrUC). Non-limiting examples of standard treatment include glucocorticosteriods, anti-TNF therapy, anti-a4-b7 therapy (vedolizumab), anti-IL12p40 therapy (ustekinumab), Thalidomide, and Cytoxin.

[0977] The terms “treat,” “treating,” and “treatment” as used herein refers to alleviating or abrogating a disorder, disease, or condition; or one or more of the symptoms associated with the disorder, disease, or condition; or alleviating or eradicating a cause of the disorder, disease, or condition itself. Desirable effects of treatment can include, but are not limited to, preventing occurrence or recurrence of disease, alleviation of symptoms, diminishing any direct or indirect pathological consequences of the disease, preventing metastasis, decreasing the rate of disease progression, amelioration or palliation of the disease state and remission or improved prognosis.

[0978] The term “therapeutically effective amount” refers to the amount of a compound or therapy that, when administered, is sufficient to prevent development of, or alleviate to some extent, one or more of the symptoms of a disorder, disease, or condition of the disease; or the amount of a compound that is sufficient to elicit biological or medical response of a cell, tissue, system, animal, or human that is being sought by a researcher, veterinarian, medical doctor, or clinician.

[0979] The term “pharmaceutically acceptable carrier,” “pharmaceutically acceptable excipient,” “physiologically acceptable carrier,” or “physiologically acceptable excipient” refers to a pharmaceutically-acceptable material, composition, or vehicle, such as a liquid or solid filler, diluent, excipient, solvent, or encapsulating material. A component can be “pharmaceutically acceptable” in the sense of being compatible with the other ingredients of a pharmaceutical formulation. It can also be suitable for use in contact with the tissue or organ of humans and animals without excessive toxicity, irritation, allergic response, immunogenicity, or other problems or complications, commensurate with a reasonable benefit/risk ratio. See, Remington: The Science and Practice of Pharmacy, 21st Edition; Lippincott Williams & Wilkins: Philadelphia, PA, 2005; Handbook of Pharmaceutical Excipients, 5th Edition; Rowe et al., Eds., The Pharmaceutical Press and the American Pharmaceutical Association: 2005; and Handbook of Pharmaceutical Additives, 3rd Edition; Ash and Ash Eds., Gower Publishing Company: 2007; Pharmaceutical Preformulation and Formulation, Gibson Ed., CRC Press LLC: Boca Raton, FL, 2004).

[0980] The term “pharmaceutical composition” refers to a mixture of a compound disclosed herein with other chemical components, such as diluents or carriers. The pharmaceutical composition can facilitate administration of the compound to an organism. Multiple techniques of administering a compound exist in the art including, but not limited to, oral, injection, aerosol, parenteral, and topical administration.

[0981] The term “inflammatory bowel disease” or “IBD” as used herein refers to gastrointestinal disorders of the gastrointestinal tract. Non-limiting examples of IBD include, Crohn's disease (CD), ulcerative colitis (UC), indeterminate colitis (IC), microscopic colitis, diversion colitis, Behcet's disease, and other inconclusive forms of IBD. In some instances, IBD comprises fibrosis, fibrostenosis, stricturing and/or penetrating disease, obstructive disease, or a disease that is refractory (e.g., mrUC, refractory CD), perianal CD, or other complicated forms of IBD.

[0982] Non-limiting examples of “sample” include any material from which nucleic acids and/or proteins can be obtained. As non-limiting examples, this includes whole blood, peripheral blood, plasma, serum, saliva, mucus, urine, semen, lymph, fecal extract, cheek swab, cells or other bodily fluid or tissue, including but not limited to tissue obtained through surgical biopsy or surgical resection. In various embodiments, the sample comprises tissue from the large and/or small intestine. In various embodiments, the large intestine sample comprises the cecum, colon (the ascending colon, the transverse colon, the descending colon, and the sigmoid colon), rectum and/or the anal canal. In some embodiments, the small intestine sample comprises the duodenum, jejunum, and/or the ileum. Alternatively, a sample can be obtained through primary patient derived cell lines, or archived patient samples in the form of preserved samples, or fresh frozen samples.

[0983] The term “biomarker” comprises a measurable substance in a subject whose presence, level, or activity, is indicative of a phenomenon (e.g., phenotypic expression or activity; disease, condition, subclinical phenotype of a disease or condition, infection; or environmental stimuli). In some embodiments, a biomarker comprises a gene, gene expression product (e.g., RNA or protein), or a cell-type (e.g., immune cell).

[0984] The term “serological marker,” as used herein refers to a type of biomarker representing an antigenic response in a subject that may be detected in the serum of the subject. In some embodiments, a serological comprises an antibody against various fungal antigens. Non-limiting examples of a serological marker comprise anti-Saccharomyces cerevisiae antibody (ASCA), an anti-neutrophil cytoplasmic antibody (ANCA), E. coli outer membrane porin protein C (OmpC), anti-Malassezia restricta antibody, anti-Malassezia pachydermatis antibody, anti-Malassezia furfur antibody, anti-Malassezia globasa antibody, anti-Cladosporium albicans antibody, anti-laminaribiose antibody (ALCA), anti-chitobioside antibody (ACCA), anti-laminarin antibody, anti-chitin antibody, pANCA antibody, anit-I2 antibody, and anti-Cbir1 flagellin antibody.

[0985] The term “microbiome” and its variation used herein describe the populations and interactions of the bacteria, fungi, protists, and virus that align the gastrointestinal tract of a subject. A subject afflicted with IBD may possess presence, absence, excess, diminished, or a combination thereof of a microbiome s compared to a healthy subject.

[0986] The terms “response,” or “responsive,” as used herein, refers to phenomena in which a subject or a patient responds to the induction of a therapy, or a “successful induction” of the therapy, which may in some cases, be an initial therapeutic response or benefit provided by the therapy.

[0987] The terms “non-response,” or “loss-of-response,” as used herein, refer to phenomena in which a subject or a patient does not respond to the induction of a standard treatment (e.g, anti-TNF therapy), or experiences a loss of response to the standard treatment after a successful induction of the therapy. The induction of the standard treatment may include 1, 2, 3, 4, or 5, doses of the therapy. A “successful induction” of the therapy may be an initial therapeutic response or benefit provided by the therapy. The loss of response may be characterized by a reappearance of symptoms consistent with a flare after a successful induction of the therapy.

[0988] The term, “transcriptomic risk signature,” or “transcriptomic signature,” as disclosed herein, refers to two or more biomarkers comprising transcribed polynucleotides (e.g., RNA, cDNA) whose presence, level, or activity, is indicative of a phenomenon (e.g., phenotypic expression or activity; disease, condition, subclinical phenotype of a disease or condition, infection; or environmental stimuli). In some embodiments, the biomarkers comprise non-protein coding oligonucleotide sequence. In some embodiments, the biomarkers comprise protein coding oligonucleotide sequence, such as mRNA or cDNA.

[0989] The term, “transcriptomic risk profile,” or “transcriptomic profile,” as disclosed herein, refers to the particular level of expression or activity of a transcriptomic risk signature or transcriptomic signature in a subject at a point in time.

[0990] Where substituent groups are specified by their conventional chemical formulae, Written from left to right, they equally encompass the chemically identical substituents that result from writing the structure from right to left, e.g., —CH₂O— is equivalent to —OCH₂—.

[0991] The term “alkyl,” by itself or as part of another substituent, means, unless otherwise stated, a straight (i.e., unbranched) or branched carbon chain (or carbon), or combination thereof, which may be fully saturated, mono- or polyunsaturated and includes mono-, di- and multivalent radicals, having the number of carbon atoms designated (i.e., C₁-C₁₀ means one to ten carbons). Alkyl is an uncyclized chain. Examples of saturated hydrocarbon radicals include, but are not limited to, groups such as methyl, ethyl, n-propyl, isopropyl, n-butyl, t-butyl, isobutyl, sec-butyl, (cyclohexyl)methyl, homologs and isomers of, for example, n-pentyl, n-hexyl, n-heptyl, n-octyl, and the like. An unsaturated alkyl group is one having one or more double bonds or triple bonds. Examples of unsaturated alkyl groups include, but are not limited to, vinyl, 2-propenyl, crotyl, 2-isopentenyl, 2-(butadienyl), 2,4-pentadienyl, 3-(1,4-pentadienyl), ethynyl, 1- and 3-propynyl, 3-butynyl, and the higher homologs and isomers. An alkyl group can be straight or branched Examples of alkyl groups include, but are not limited to, methyl, ethyl, propyl, isopropyl, butyl, isobutyl, sec-butyl, tert-butyl, n-pentyl, n-heptyl, or 2-ethylhexyl. An alkyl group can be substituted (i.e., optionally substituted) with one or more substituents such as halo, phospho, cycloaliphatic [e.g., cycloalkyl or cycloalkenyl], heterocycloaliphatic [e.g., heterocycloalkyl or heterocycloalkenyl], aryl, heteroaryl, alkoxy, aroyl, heteroaroyl, acyl [e.g., (aliphatic)carbonyl, (cycloaliphatic)carbonyl, or (heterocycloaliphatic)carbonyl], nitro, cyano, amido [e.g., (cycloalkylalkyl)carbonylamino, arylcarbonylamino, aralkylcarbonylamino, (heterocycloalkyl)carbonylamino, (heterocycloalkylalkyl)carbonylamino, heteroarylcarbonylamino, heteroaralkylcarbonylamino alkylaminocarbonyl, cycloalkylaminocarbonyl, heterocycloalkylaminocarbonyl, arylaminocarbonyl, or heteroarylaminocarbonyl], amino [e.g., aliphaticamino, cycloaliphaticamino, or heterocycloaliphaticamino], sulfonyl [e.g., aliphatic-SO₂—], sulfinyl, sulfanyl, sulfoxy, urea, thiourea, sulfamoyl, sulfamide, oxo, carboxy, carbamoyl, cycloaliphaticoxy, heterocycloaliphaticoxy, aryloxy, heteroaryloxy, aralkyloxy, heteroarylalkoxy, alkoxycarbonyl, alkylcarbonyloxy, or hydroxy. Without limitation, some examples of substituted alkyls include carboxyalkyl (such as HOOC-alkyl, alkoxycarbonylalkyl, and alkylcarbonyloxyalkyl), cyanoalkyl, hydroxyalkyl, alkoxyalkyl, acylalkyl, aralkyl, (alkoxyaryl)alkyl, (sulfonylamino)alkyl (such as (alkyl-SO₂-amino)alkyl), aminoalkyl, amidoalkyl, (cycloaliphatic)alkyl, or haloalkyl. An alkoxy is an alkyl attached to the remainder of the molecule via an oxygen linker (—O—).

[0992] As used herein, an “alkenyl” group refers to an aliphatic carbon group that contains 2-8 (e.g., 2-8, 2-6, or 2-4) carbon atoms and at least one double bond Like an alkyl group, an alkenyl group can be straight or branched. Examples of an alkenyl group include, but are not limited to allyl, isoprenyl, 2-butenyl, and 2-hexenyl. An alkenyl group can be optionally substituted with one or more substituents such as halo, phospho, cycloaliphatic [e.g., cycloalkyl or cycloalkenyl], heterocycloaliphatic [e.g., heterocycloalkyl or heterocycloalkenyl], aryl, heteroaryl, alkoxy, aroyl, heteroaroyl, acyl [e.g., (aliphatic)carbonyl, (cycloaliphatic)carbonyl, or (heterocycloaliphatic)carbonyl], nitro, cyano, amido [e.g., (cycloalkylalkyl)carbonylamino, arylcarbonylamino, aralkylcarbonylamino, (heterocycloalkyl)carbonylamino, (heterocycloalkylalkyl)carbonylamino, heteroarylcarbonylamino, heteroaralkylcarbonylamino alkylaminocarbonyl, cycloalkylaminocarbonyl, heterocycloalkylaminocarbonyl, aylaminocarbonyl, or heteroarylaminocarbonyl], amino [e.g., aliphaticamino, cycloaliphaticamino, heterocycloaliphaticamino, or aliphaticsulfonylamino], sulfonyl [e.g., alkyl-SO₂—, cycloaliphatic-SO₂—, or aryl-SO₂—], sulfinyl, sulfanyl, sulfoxy, urea, thiourea, sulfamoyl, sulfamide, oxo, carboxy, carbamoyl, cycloaliphaticoxy, heterocycloaliphaticoxy, aryloxy, heteroaryloxy, aralkyloxy, heteroaralkoxy, alkoxycarbonyl, alkylcarbonyloxy, or hydroxy. Without limitation, some examples of substituted alkenyls include cyanoalkenyl, alkoxyalkenyl, acylalkenyl, hydroxyalkenyl, aralkenyl, (alkoxyaryl)alkenyl, (sulfonylamino)alkenyl (such as (alkyl-SO₂-amino)alkenyl), aminoalkenyl, amidoalkenyl, (cycloaliphatic)alkenyl, or haloalkenyl.

[0993] As used herein, an “alkynyl” group refers to an aliphatic carbon group that contains 2-8 (e.g., 2-8, 2-6, or 2-4) carbon atoms and has at least one triple bond. An alkynyl group can be straight or branched. Examples of an alkynyl group include, but are not limited to, propargyl and butynyl. An alkynyl group can be optionally substituted with one or more substituents such as aroyl, heteroaroyl, alkoxy, cycloalkyloxy, heterocycloalkyloxy, aryloxy, heteroaiyloxy, aralkyloxy, nitro, carboxy, cyano, halo, hydroxy, sulfo, mercapto, sulfanyl [e.g., aliphaticsulfanyl or cycloaliphaticsulfanyl], sulfinyl [e.g., aliphaticsulfinyl or cycloaliphaticsulfinyl], sulfonyl [e.g., aliphatic-SO₂—, aliphaticamino-SO₂—, or cycloaliphatic-SO₂—], amido [e.g., aminocarbonyl, alkylaminocarbonyl, alkylcarbonylamino, cycloalkylaminocarbonyl, heterocycloalkylaminocarbonyl, cycloalkylcarbonylamino, arylaminocarbonyl, arylcarbonylamino, aralkylcarbonylamino, (heterocycloalkyl)carbonylamino, (cycloalkylalkyl)carbonylamino, heteroaralkylcarbonylamino, heteroarylcarbonylamino or heteroarylaminocarbonyl], urea, thiourea, sulfamoyl, sulfamide, alkoxycarbonyl, alkylcarbonyloxy, cycloaliphatic, heterocycloaliphatic, aryl, heteroaryl, acyl [e.g., (cycloaliphatic)carbonyl or (heterocycloaliphatic)carbonyl], amino [e.g., aliphaticamino], sulfoxy, oxo, carboxy, carbamoyl, (cycloaliphatic)oxy, (heterocycloaliphatic)oxy, or (heteroaryl)alkoxy.

[0994] The term “alkylene,” by itself or as part of another substituent, means, unless otherwise stated, a divalent radical derived from an alkyl, as exemplified, but not limited by, —CH₂CH₂CH₂CH₂—. Typically, an alkyl (or alkylene) group will have from 1 to 24 carbon atoms, with those groups having 10 or fewer carbon atoms being preferred herein. A “lower alkyl” or “lower alkylene” is a shorter chain alkyl or alkylene group, generally having eight or fewer carbon atoms. The term “alkenylene,” by itself or as part of another substituent, means, unless otherwise stated, a divalent radical derived from an alkene.

[0995] As used herein, an “amido” encompasses both “aminocarbonyl” and “carbonylamino”. These terms when used alone or in connection with another group refer to an amido group such as —N(R^{X})—C(O)—R^{Y} or —C(O)—N(R^{X})₂, when used terminally, and —C(O)—N(R^{X})— or —N(R^{X})—C(O)— when used internally, wherein RX and RY are defined below. Examples of amido groups include alkylamido (such as alkylcarbonylamino or alkylaminocarbonyl), (heterocycloaliphatic)amido, (heteroaralkyl)amido, (heteroaryl)amido, (heterocycloalkyl)alkylamido, arylamido, aralkylamido, (cycloalkyl)alkylamido, or cycloalkylamido.

[0996] As used herein, an “amino” group refers to —NR^{X}R^{Y} wherein each of R^{X} and R^{Y} is independently hydrogen, aliphatic, cycloaliphatic, (cycloaliphatic)aliphatic, aryl, araliphatic, heterocycloaliphatic, (heterocycloaliphatic)aliphatic, heteroaryl, carboxy, sulfanyl, sulfinyl, sulfonyl, (aliphatic)carbonyl, (cycloaliphatic)carbonyl, ((cycloaliphatic)aliphatic)carbonyl, arylcarbonyl, (araliphatic)carbonyl, (heterocycloaliphatic)carbonyl, ((heterocycloaliphatic)aliphatic)carbonyl, (heteroaryl)carbonyl, or (heteroaraliphatic)carbonyl, each of which being defined herein and being optionally substituted. Examples of amino groups include alkylamino, dialkylamino, or arylamino. When the term “amino” is not the terminal group (e.g., alkylcarbonylamino), it is represented by —NR—. R^{X} has the same meaning as defined above.

[0997] As used herein, an “aralkyl” group refers to an alkyl group (e.g., a C₁₋₄ alkyl group) that is substituted with an aryl group. Both “alkyl” and “aryl” have been defined above. An example of an aralkyl group is benzyl. An aralkyl is optionally substituted with one or more substituents such as aliphatic [e.g., alkyl, alkenyl, or alkynyl, including carboxyalkyl, hydroxyalkyl, or haloalkyl such as trifluoromethyl], cycloaliphatic [e.g., cycloalkyl or cycloalkenyl], (cycloalkyl)alkyl, heterocycloalkyl, (heterocycloalkyl)alkyl, aryl, heteroaryl, alkoxy, cycloalkyloxy, heterocycloalkyloxy, aryloxy, heteroaryloxy, aralkyloxy, heteroaralkyloxy, aroyl, heteroaroyl, nitro, carboxy, alkoxycarbonyl, alkylcarbonyloxy, amido [e.g., aminocarbonyl, alkylcarbonylamino, cycloalkylcarbonylamino, (cycloalkylalkyl)carbonylamino, arylcarbonylamino, aralkylcarbonylamino, (heterocycloalkyl)carbonylamino, (heterocycloalkylalkyl)carbonylamino, heteroarylcarbonylamino, or heteroaralkylcarbonylamino], cyano, halo, hydroxy, acyl, mercapto, alkylsulfanyl, sulfoxy, urea, thiourea, sulfamoyl, sulfamide, oxo, or carbamoyl.

[0998] As used herein, a “bicyclic ring system” includes 8-12 (e.g., 9, 10, or 11) membered structures that form two rings, wherein the two rings have at least one atom in common (e.g., 2 atoms in common). Bicyclic ring systems include bicycloaliphatics (e.g., bicycloalkyl or bicycloalkenyl), bicycloheteroaliphatics, bicyclic aryls, and bicyclic heteroaryls.

[0999] The term “heteroalkyl,” by itself or in combination with another term, means, unless otherwise stated, a stable straight or branched chain, or combinations thereof, including at least one carbon atom and at least one heteroatom (e.g., O, N, P, Si, and S), and wherein the nitrogen and sulfur atoms may optionally be oxidized, and the nitrogen heteroatom may optionally be quaternized. The heteroatom(s) (e.g., N, S, Si, or P) may be placed at any interior position of the heteroalkyl group or at the position at which the alkyl group is attached to the remainder of the molecule. Heteroalkyl is an uncyclized chain. Examples include, but are not limited to: —CH₂—CH₂—O—CH₃, —CH₂—CH₂—NH—CH₃, —CH₂—CH₂—N(CH₃)—CH₃, —CH₂—S—CH₂—CH₃, —CH₂—CH₂, —S(O)—CH₃, —CH₂—CH₂—S(O)₂—CH₃, —CH═CH—O—CH₃, —Si(CH₃)₃, —CH₂—CH═N—OCH₃, —CH═CH—N(CH₃)—CH₃, —O—CH₃, —O—CH₂—CH₃, and —CN. Up to two or three heteroatoms may be consecutive, such as, for example, —CH₂—NH—OCH₃ and —CH₂—O—Si(CH₃)₃. A heteroalkyl moiety may include one heteroatom (e.g., O, N, S, Si, or P). A heteroalkyl moiety may include two optionally different heteroatoms (e.g., O, N, S, Si, or P). A heteroalkyl moiety may include three optionally different heteroatoms (e.g., O, N, S, Si, or P). A heteroalkyl moiety may include four optionally different heteroatoms (e.g., O, N, S, Si, or P). A heteroalkyl moiety may include five optionally different heteroatoms (e.g., O, N, S, Si, or P). A heteroalkyl moiety may include up to 8 optionally different heteroatoms (e.g., O, N, S, Si, or P).

[1000] Similarly, the term “heteroalkylene,” by itself or as part of another substituent, means, unless otherwise stated, a divalent radical derived from heteroalkyl, as exemplified, but not limited by, —CH₂—CH₂—S—CH₂—CH₂— and —CH₂—S—CH₂—CH₂—NH—CH₂—. For heteroalkylene groups, heteroatoms can also occupy either or both of the chain termini (e.g., alkyleneoxy, alkylenedioxy, alkyleneamino, alkylenediamino, and the like). Still further, for alkylene and heteroalkylene linking groups, no orientation of the linking group is implied by the direction in which the formula of the linking group is written. For example, the formula —C(O)₂R′— represents both —C(O)₂R′— and —R′C(O)₂—. As described above, heteroalkyl groups, as used herein, include those groups that are attached to the remainder of the molecule through a heteroatom, such as —C(O)R′, —C(O)NR′, —NR′R″, —OR′, —SR′, and/or —SO₂R′. Where “heteroalkyl” is recited, followed by recitations of specific heteroalkyl groups, such as —NR′R″ or the like, it will be understood that the terms heteroalkyl and —NR′R″ are not redundant or mutually exclusive. Rather, the specific heteroalkyl groups are recited to add clarity. Thus, the term “heteroalkyl” should not be interpreted herein as excluding specific heteroalkyl groups, such as —NR′R″ or the like.

[1001] The terms “cycloalkyl” and “heterocycloalkyl,” by themselves or in combination with other terms, mean, unless otherwise stated, cyclic versions of “alkyl” and “heteroalkyl,” respectively. Cycloalkyl and heterocycloalkyl are not aromatic. Additionally, for heterocycloalkyl, a heteroatom can occupy the position at which the heterocycle is attached to the remainder of the molecule. Examples of cycloalkyl include, but are not limited to, cyclopropyl, cyclobutyl, cyclopentyl, cyclohexyl, 1-cyclohexenyl, 3-cyclohexenyl, cycloheptyl, and the like. Examples of heterocycloalkyl include, but are not limited to, 1-(1,2,5,6-tetrahydropyridyl), 1-piperidinyl, 2-piperidinyl, 3-piperidinyl, 4-morpholinyl, 3-morpholinyl, tetrahydrofuran-2-yl, tetrahydrofuran-3-yl, tetrahydrothien-2-yl, tetrahydrothien-3-yl, 1-piperazinyl, 2-piperazinyl, and the like. A “cycloalkylene” and a “heterocycloalkylene,” alone or as part of another substituent, means a divalent radical derived from a cycloalkyl and heterocycloalkyl, respectively. “Cycloalkyl” is also meant to refer to bicyclic and polycyclic hydrocarbon rings such as, for example, bicyclo[2.2.1]heptane, bicyclo[2.2.2]octane, etc.

[1002] A “heterocycloalkenyl” group, as used herein, refers to a mono- or bicylic (e.g., 5- to 10-membered mono- or bicyclic) non-aromatic ring structure having one or more double bonds, and wherein one or more of the ring atoms is a heteroatom (e.g., N, O, or S). Monocyclic and bicyclic heterocycloaliphatics are numbered according to standard chemical nomenclature.

[1003] The terms “halo” or “halogen,” by themselves or as part of another substituent, mean, unless otherwise stated, a fluorine, chlorine, bromine, or iodine atom. Additionally, terms such as “haloalkyl” are meant to include monohaloalkyl and polyhaloalkyl. For example, the term “halo(C₁-C₄)alkyl” includes, but is not limited to, fluoromethyl, difluoromethyl, trifluoromethyl, 2,2,2-trifluoroethyl, 4-chlorobutyl, 3-bromopropyl, and the like.

[1004] The term “acyl” means, unless otherwise stated, —C(O)R where R is a substituted or unsubstituted alkyl, substituted or unsubstituted cycloalkyl, substituted or unsubstituted heteroalkyl, substituted or unsubstituted heterocycloalkyl, substituted or unsubstituted aryl, or substituted or unsubstituted heteroaryl.

[1005] As used herein, a “carbamoyl” group refers to a group having the structure —O—CO—NR^{X}R^{Y} or —NR^{X}—CO—O—R^{Z}, wherein R^{X} and R^{Y} have been defined above and R^{Z} can be aliphatic, aryl, araliphatic, heterocycloaliphatic, heteroaryl, or heteroaraliphatic.

[1006] As used herein, a “carboxy” group refers to —COOH, —COOR^{X}, —OC(O)H, —OC(O)R^{X}, when used as a terminal group; or —OC(O)— or —C(O)O— when used as an internal group.

[1007] As used herein, a “haloaliphatic” group refers to an aliphatic group substituted with 1-3 halogens. For instance, the term haloalkyl includes the group —CF₃.

[1008] As used herein, a “mercapto” group refers to —SH.

[1009] As used herein, a “sulfo” group refers to —SO₃H or —SO₃R^{X} when used terminally or —S(O)₃—when used internally.

[1010] As used herein, a “sulfamide” group refers to the structure —NR^{X}—S(O)₂—NR^{Y}R^{Z} when used terminally and —NR^{X}—S(O)₂—NR^{Y}—when used internally, wherein R^{X}, R^{Y}, and R^{Z} have been defined above.

[1011] As used herein, a “sulfonamide” group refers to the structure —S(O)₂—NR^{X}R^{Y} or —NR^{Y}—S(O)₂—R^{Z} when used terminally; or —S(O)₂—NR^{X}— or —NR^{X}—S(O)₂—when used internally, wherein R^{X}, R^{Y}, and R^{Z} are defined above.

[1012] As used herein a “sulfanyl” group refers to —S—R^{X} when used terminally and —S—when used internally, wherein R^{X} has been defined above. Examples of sulfanyls include aliphatic-S—, cycloaliphatic-S—, aryl-S—, or the like.

[1013] As used herein a “sulfinyl” group refers to —S(O)—R^{X} when used terminally and —S(O)—when used internally, wherein R^{X} has been defined above. Exemplary sulfinyl groups include aliphatic-S(O)—, aryl-S(O)—, (cycloaliphatic(aliphatic))—S(O)—, cycloalkyl-S(O)—, heterocycloaliphatic-S(O)—, heteroaryl-S(O)—, or the like.

[1014] As used herein, a “sulfonyl” group refers to —S(O)₂—R^{X} when used terminally and —S(O)₂—when used internally, wherein R^{X} has been defined above. Exemplary sulfonyl groups include aliphatic-S(O)₂—, aryl-S(O)₂—, (cycloaliphatic(aliphatic))-S(O)₂—, cycloaliphatic-S(O)₂—, heterocycloaliphatic-S(O)₂—, heteroaryl-S(O)₂—, (cycloaliphatic(amido(aliphatic)))-S(O)₂— or the like.

[1015] As used herein, a “sulfoxy” group refers to —O—SO—R or —SO—O—R, when used terminally and —O—S(O)— or —S(O)—O—when used internally, where R^{X} has been defined above.

[1016] As used herein, the term “phospho” refers to phosphinates and phosphonates. Examples of phosphinates and phosphonates include —P(O)(R^{P})₂, wherein R^{P} is aliphatic, alkoxy, aryloxy, heteroaryloxy, (cycloaliphatic)oxy, (heterocycloaliphatic)oxy aryl, heteroaryl, cycloaliphatic or amino.

[1017] As used herein, an “aminoalkyl” refers to the structure (R^{X})₂N-alkyl-.

[1018] As used herein, a “cyanoalkyl” refers to the structure (NC)-alkyl-.

[1019] As used herein, a “urea” group refers to the structure —NR^{X}—CO—NR^{Y}R^{Z} and a “thiourea” group refers to the structure —NR^{X}—CS—NR^{Y}R^{Z} when used terminally and —NR^{X}—CO—NR^{Y}— or —NR^{X}—CS—NR^{Y}— when used internally, wherein R^{x}, R^{Y}, and R^{Z} have been defined above.

[1020] As used herein, a “guanidine” group refers to the structure —N═C(N(R^{X}R^{Y}))N(R^{X}R^{Y}) or —NR^{X}—C(═NR^{X})NR^{X}R^{Y} wherein R^{X} and R^{Y} have been defined above.

[1021] As used herein, the term “amidino” group refers to the structure —C=(NR^{X})N(R^{X}R^{Y}) wherein R^{X} and R^{Y} have been defined above.

[1022] In general, the term “vicinal” refers to the placement of substituents on a group that includes two or more carbon atoms, wherein the substituents are attached to adjacent carbon atoms.

[1023] In general, the term “geminal” refers to the placement of substituents on a group that includes two or more carbon atoms, wherein the substituents are attached to the same carbon atom.

[1024] The terms “terminally” and “internally” refer to the location of a group within a substituent. A group is terminal when the group is present at the end of the substituent not further bonded to the rest of the chemical structure. Carboxyalkyl, i.e., R^{X}O(O)C-alkyl is an example of a carboxy group used terminally. A group is internal when the group is present in the middle of a substituent of the chemical structure. Alkylcarboxy (e.g., alkyl-C(O)O— or alkyl-OC(O)—) and alkylcarboxyaryl (e.g., alkyl-C(O)O-aryl- or alkyl-O(CO)-aryl-) are examples of carboxy groups used internally.

[1025] As used herein, an “aliphatic chain” refers to a branched or straight aliphatic group (e.g., alkyl groups, alkenyl groups, or alkynyl groups). A straight aliphatic chain has the structure —[CH₂]ᵥ—, where v is 1-12. A branched aliphatic chain is a straight aliphatic chain that is substituted with one or more aliphatic groups. A branched aliphatic chain has the structure —[CQQ]ᵥ— where Q is independently a hydrogen or an aliphatic group; however, Q shall be an aliphatic group in at least one instance. The term aliphatic chain includes alkyl chains, alkenyl chains, and alkynyl chains, where alkyl, alkenyl, and alkynyl are defined above.

[1026] The phrase “optionally substituted” is used interchangeably with the phrase “substituted or unsubstituted.” As described herein, compounds of the invention can optionally be substituted with one or more substituents, such as are illustrated generally above, or as exemplified by particular classes, subclasses, and species of the invention. As described herein, the variables R¹, R², and R₃, and other variables contained in formulae described herein encompass specific groups, such as alkyl and aryl. Unless otherwise noted, each of the specific groups for the variables R¹, R², and R³, and other variables contained therein can be optionally substituted with one or more substituents described herein. Each substituent of a specific group is further optionally substituted with one to three of halo, cyano, oxo, alkoxy, hydroxy, amino, nitro, aryl, cycloaliphatic, heterocycloaliphatic, heteroaryl, haloalkyl, and alkyl. For instance, an alkyl group can be substituted with alkylsulfanyl and the alkylsulfanyl can be optionally substituted with one to three of halo, cyano, oxo, alkoxy, hydroxy, amino, nitro, aryl, haloalkyl, and alkyl. As an additional example, the cycloalkyl portion of a (cycloalkyl)carbonylamino can be optionally substituted with one to three of halo, cyano, alkoxy, hydroxy, nitro, haloalkyl, and alkyl. When two alkoxy groups are bound to the same atom or adjacent atoms, the two alkoxy groups can form a ring together with the atom(s) to which they are bound.

[1027] In general, the term “substituted,” whether preceded by the term “optionally” or not, refers to the replacement of hydrogen radicals in a given structure with the radical of a specified substituent. Specific substituents are described above in the definitions and below in the description of compounds and examples thereof. Unless otherwise indicated, an optionally substituted group can have a substituent at each substitutable position of the group, and when more than one position in any given structure can be substituted with more than one substituent selected from a specified group, the substituent can be either the same or different at every position. A ring substituent, such as a heterocycloalkyl, can be bound to another ring, such as a cycloalkyl, to form a spiro-bicyclic ring system, e.g., both rings share one common atom. As one of ordinary skill in the art will recognize, combinations of substituents envisioned by this disclosure are those combinations that result in the formation of stable or chemically feasible compounds.

[1028] The term “aryl” means, unless otherwise stated, a polyunsaturated, aromatic, hydrocarbon substituent, which can be a single ring or multiple rings (preferably from 1 to 3 rings) that are fused together (i.e., a fused ring aryl) or linked covalently. A fused ring aryl refers to multiple rings fused together wherein at least one of the fused rings is an aryl ring.

[1029] The term “heteroaryl” refers to aryl groups (or rings) that contain at least one heteroatom such as N, O, or S, wherein the nitrogen and sulfur atoms are optionally oxidized, and the nitrogen atom(s) are optionally quaternized. Thus, the term “heteroaryl” includes fused ring heteroaryl groups (i.e., multiple rings fused together wherein at least one of the fused rings is a heteroaromatic ring). A 5,6-fused ring heteroarylene refers to two rings fused together, wherein one ring has 5 members and the other ring has 6 members, and wherein at least one ring is a heteroaryl ring. Likewise, a 6,6-fused ring heteroarylene refers to two rings fused together, wherein one ring has 6 members and the other ring has 6 members, and wherein at least one ring is a heteroaryl ring. And a 6,5-fused ring heteroarylene refers to two rings fused together, wherein one ring has 6 members and the other ring has 5 members, and wherein at least one ring is a heteroaryl ring. A heteroaryl group can be attached to the remainder of the molecule through a carbon or heteroatom. Non-limiting examples of aryl and heteroaryl groups include phenyl, naphthyl, pyrrolyl, pyrazolyl, pyridazinyl, triazinyl, pyrimidinyl, imidazolyl, pyrazinyl, purinyl, oxazolyl, isoxazolyl, thiazolyl, furyl, thienyl, pyridyl, pyrimidyl, benzothiazolyl, benzoxazoyl benzimidazolyl, benzofuran, isobenzofuranyl, indolyl, isoindolyl, benzothiophenyl, isoquinolyl, quinoxalinyl, quinolyl, 1-naphthyl, 2-naphthyl, 4-biphenyl, 1-pyrrolyl, 2-pyrrolyl, 3-pyrrolyl, 3-pyrazolyl, 2-imidazolyl, 4-imidazolyl, pyrazinyl, 2-oxazolyl, 4-oxazolyl, 2-phenyl-4-oxazolyl, 5-oxazolyl, 3-isoxazolyl, 4-isoxazolyl, 5-isoxazolyl, 2-thiazolyl, 4-thiazolyl, 5-thiazolyl, 2-furyl, 3-furyl, 2-thienyl, 3-thienyl, 2-pyridyl, 3-pyridyl, 4-pyridyl, 2-pyrimidyl, 4-pyrimidyl, 5-benzothiazolyl, purinyl, 2-benzimidazolyl, 5-indolyl, 1-isoquinolyl, 5-isoquinolyl, 2-quinoxalinyl, 5-quinoxalinyl, 3-quinolyl, and 6-quinolyl. Substituents for each of the above noted aryl and heteroaryl ring systems are selected from the group of acceptable substituents described below. An “arylene” and a “heteroarylene,” alone or as part of another substituent, mean a divalent radical derived from an aryl and heteroaryl, respectively. A heteroaryl group substituent may be —O— bonded to a ring heteroatom nitrogen.

[1030] As used herein, “cyclic moiety” and “cyclic group” refer to mono-, bi-, and tri-cyclic ring systems including cycloaliphatic, heterocycloaliphatic, aryl, or heteroaryl, each of which has been previously defined.

[1031] Spirocyclic rings are two or more rings wherein adjacent rings are attached through a single atom. The individual rings within spirocyclic rings may be identical or different. Individual rings in spirocyclic rings may be substituted or unsubstituted and may have different substituents from other individual rings within a set of spirocyclic rings. Possible substituents for individual rings within spirocyclic rings are the possible substituents for the same ring when not part of spirocyclic rings (e.g. substituents for cycloalkyl or heterocycloalkyl rings). Spirocylic rings may be substituted or unsubstituted cycloalkyl, substituted or unsubstituted cycloalkylene, substituted or unsubstituted heterocycloalkyl or substituted or unsubstituted heterocycloalkylene and individual rings within a spirocyclic ring group may be any of the immediately previous list, including having all rings of one type (e.g. all rings being substituted heterocycloalkylene wherein each ring may be the same or different substituted heterocycloalkylene). When referring to a spirocyclic ring system, heterocyclic spirocyclic rings means a spirocyclic rings wherein at least one ring is a heterocyclic ring and wherein each ring may be a different ring. When referring to a spirocyclic ring system, substituted spirocyclic rings means that at least one ring is substituted and each substituent may optionally be different.

[1032] The symbol “ [symbol] ” denotes the point of attachment of a chemical moiety to the remainder of a molecule or chemical formula.

[1033] The term “oxo,” as used herein, means an oxygen that is double bonded to a carbon atom.

[1034] The term “alkylarylene” as an arylene moiety covalently bonded to an alkylene moiety (also referred to herein as an alkylene linker). In embodiments, the alkylarylene group has the formula:

[chemical structure]

[1035] An alkylarylene moiety may be substituted (e.g. with a substituent group) on the alkylene moiety or the arylene linker (e.g. at carbons 2, 3, 4, or 6) with halogen, oxo, —N₃, —CF₃, —CCl₃, —CBr₃, —Cl₃, —CN, —CHO, —OH, —NH₂, —COOH, —CONH₂, —NO₂, —SH, —SO₂CH₃—SO₃H, —OSO₃H, —SO₂NH₂, |NHNH₂, |ONH₂, NHC(O)NHNH₂, substituted or unsubstituted C₁-C₅ alkyl or substituted or unsubstituted 2 to 5 membered heteroalkyl). In embodiments, the alkylarylene is unsubstituted.

[1036] Each of the above terms (e.g., “alkyl,” “heteroalkyl,” “cycloalkyl,” “heterocycloalkyl,” “aryl,” and “heteroaryl”) includes both substituted and unsubstituted forms of the indicated radical. Preferred substituents for each type of radical are provided below.

[1037] Substituents for the alkyl and heteroalkyl radicals (including those groups often referred to as alkylene, alkenyl, heteroalkylene, heteroalkenyl, alkynyl, cycloalkyl, heterocycloalkyl, cycloalkenyl, and heterocycloalkenyl) can be one or more of a variety of groups selected from, but not limited to, —OR′, =O, ═NR′, ═N—OR′, —NR′R″, —SR′, -halogen, —SiR′R″R′″, —OC(O)R′, —C(O)R′, —CO₂R′, —CONR′R″, —OC(O)NR′R″, —NR″C(O)R′, —NR′—C(O)NR″R′″, —NR″C(O)₂R′, —NR—C(NR′R″R′″)═NR′″, —NR—C(NR′R″)═NR′″, —S(O)R′, —S(O)₂R′, —S(O)₂NR′R″, —NRSO₂R′, NR′NR″R′″, ONR′R″, NR′C(O)NR″NR′″R″″, —CN, —NO₂, —NR′SO₂R′, —NR′C(O)R″, —NR′C(O)—OR″, —NR′OR″, in a number ranging from zero to (2m′+1), where m′ is the total number of carbon atoms in such radical. R, R′, R″, R′″, and R″″ each preferably independently refer to hydrogen, substituted or unsubstituted heteroalkyl, substituted or unsubstituted cycloalkyl, substituted or unsubstituted heterocycloalkyl, substituted or unsubstituted aryl (e.g., aryl substituted with 1-3 halogens), substituted or unsubstituted heteroaryl, substituted or unsubstituted alkyl, alkoxy, or thioalkoxy groups, or arylalkyl groups. When a compound described herein includes more than one R group, for example, each of the R groups is independently selected as are each R′, R″, R′″, and R″″ group when more than one of these groups is present. When R′ and R″ are attached to the same nitrogen atom, they can be combined with the nitrogen atom to form a 4-, 5-, 6-, or 7-membered ring. For example, —NR′R″ includes, but is not limited to, 1-pyrrolidinyl and 4-morpholinyl. From the above discussion of substituents, one of skill in the art will understand that the term “alkyl” is meant to include groups including carbon atoms bound to groups other than hydrogen groups, such as haloalkyl (e.g., —CF₃ and —CH₂CF₃) and acyl (e.g., —C(O)CH₃, —C(O)CF₃, —C(O)CH₂OCH₃, and the like).

[1038] Similar to the substituents described for the alkyl radical, substituents for the aryl and heteroaryl groups are varied and are selected from, for example: —OR′, —NR′R″, —SR′, -halogen, —SiR′R″R′″, —OC(O)R′, —C(O)R′, —CO₂R′, —CONR′R″, —OC(O)NR′R″, —NR″C(O)R′, —NR′—C(O)NR″R′″, —NR″C(O)₂R′, —NR—C(NR′R″R′″)═NR″″, —NR—C(NR′R″)═NR′″, —S(O)R′, —S(O)₂R′, —S(O)₂NR′R″, —NRSO₂R′, |NR′NR″R′″, |ONR′R″, NR′C(O)NR″NR′″R″″, —CN, —NO₂, —R′, —N₃, —CH(Ph)₂, fluoro(C₁-C₄)alkoxy, and fluoro(C₁-C₄)alkyl, —NR′SO₂R″, —NR′C(O)R″, —NR′C(O)—OR″, —NR′OR″, in a number ranging from zero to the total number of open valences on the aromatic ring system; and where R′, R″, R′″, and R″″ are preferably independently selected from hydrogen, substituted or unsubstituted alkyl, substituted or unsubstituted heteroalkyl, substituted or unsubstituted cycloalkyl, substituted or unsubstituted heterocycloalkyl, substituted or unsubstituted aryl, and substituted or unsubstituted heteroaryl. When a compound described herein includes more than one R group, for example, each of the R groups is independently selected as are each R′, R″, R′″, and R″″ groups when more than one of these groups is present.

[1039] Substituents for rings (e.g. cycloalkyl, heterocycloalkyl, aryl, heteroaryl, cycloalkylene, heterocycloalkylene, arylene, or heteroarylene) may be depicted as substituents on the ring rather than on a specific atom of a ring (commonly referred to as a floating substituent). In such a case, the substituent may be attached to any of the ring atoms (obeying the rules of chemical valency) and in the case of fused rings or spirocyclic rings, a substituent depicted as associated with one member of the fused rings or spirocyclic rings (a floating substituent on a single ring), may be a substituent on any of the fused rings or spirocyclic rings (a floating substituent on multiple rings). When a substituent is attached to a ring, but not a specific atom (a floating substituent), and a subscript for the substituent is an integer greater than one, the multiple substituents may be on the same atom, same ring, different atoms, different fused rings, different spirocyclic rings, and each substituent may optionally be different. Where a point of attachment of a ring to the remainder of a molecule is not limited to a single atom (a floating substituent), the attachment point may be any atom of the ring and in the case of a fused ring or spirocyclic ring, any atom of any of the fused rings or spirocyclic rings while obeying the rules of chemical valency. Where a ring, fused rings, or spirocyclic rings contain one or more ring heteroatoms and the ring, fused rings, or spirocyclic rings are shown with one more floating substituents (including, but not limited to, points of attachment to the remainder of the molecule), the floating substituents may be bonded to the heteroatoms. Where the ring heteroatoms are shown bound to one or more hydrogens (e.g. a ring nitrogen with two bonds to ring atoms and a third bond to a hydrogen) in the structure or formula with the floating substituent, when the heteroatom is bonded to the floating substituent, the substituent will be understood to replace the hydrogen, while obeying the rules of chemical valency.

[1040] Two or more substituents may optionally be joined to form aryl, heteroaryl, cycloalkyl, or heterocycloalkyl groups. Such so-called ring-forming substituents are typically, though not necessarily, found attached to a cyclic base structure. In one embodiment, the ring-forming substituents are attached to adjacent members of the base structure. For example, two ring-forming substituents attached to adjacent members of a cyclic base structure create a fused ring structure. In another embodiment, the ring-forming substituents are attached to a single member of the base structure. For example, two ring-forming substituents attached to a single member of a cyclic base structure create a spirocyclic structure. In yet another embodiment, the ring-forming substituents are attached to non-adjacent members of the base structure.

[1041] Two of the substituents on adjacent atoms of the aryl or heteroaryl ring may optionally form a ring of the formula -T-C(O)—(CRR′)_{q}—U—, wherein T and U are independently —NR—, —O—, —CRR′—, or a single bond, and q is an integer of from 0 to 3. Alternatively, two of the substituents on adjacent atoms of the aryl or heteroaryl ring may optionally be replaced with a substituent of the formula -A-(CH₂)ᵣ—B—, wherein A and B are independently —CRR′—, —O—, —NR—, —S—, —S(O)—, —S(O)₂—, —S(O)₂NR′—, or a single bond, and r is an integer of from 1 to 4. One of the single bonds of the new ring so formed may optionally be replaced with a double bond. Alternatively, two of the substituents on adjacent atoms of the aryl or heteroaryl ring may optionally be replaced with a substituent of the formula —(CRR′)ₛ—X′—(C″R″R′″)_{d}—, where s and d are independently integers of from 0 to 3, and X′ is —O—, —NR′—, —S—, —S(O)—, —S(O)₂—, or —S(O)₂NR′—. The substituents R, R′, R″, and R′″ are preferably independently selected from hydrogen, substituted or unsubstituted alkyl, substituted or unsubstituted heteroalkyl, substituted or unsubstituted cycloalkyl, substituted or unsubstituted heterocycloalkyl, substituted or unsubstituted aryl, and substituted or unsubstituted heteroaryl.

[1042] As used herein, the terms “heteroatom” or “ring heteroatom” are meant to include oxygen (O), nitrogen (N), sulfur (S), phosphorus (P), and silicon (Si).

[1043] A “substituent group,” as used herein, means a group selected from the following moieties:
[1044] oxo, halogen, —CF₃, —CN, —OH, —NH₂, —COOH, —CONH₂, —NO₂, —SH, —SO₃H, —SO₄H, —SO₂NH₂, |NHNH₂, ONH₂, NHC=(O)NHNH₂, |NHC=(O) NH₂, —NHSO₂H, —NHC=(O)H, —NHC(O)—OH, —NHOH, —OCF₃, —OCHF₂, unsubstituted alkyl, unsubstituted heteroalkyl, unsubstituted cycloalkyl, unsubstituted heterocycloalkyl, unsubstituted aryl, unsubstituted heteroaryl, and
[1045] alkyl, heteroalkyl, cycloalkyl, heterocycloalkyl, aryl, heteroaryl, substituted with at least one substituent selected from:
[1046] oxo, halogen, —CF₃, —CN, —OH, —NH₂, —COOH, —CONH₂, —NO₂, —SH, —SO₃H, —SO₄H, —SO₂NH₂, |NHNH₂, ONH₂, NHC=(O)NHNH₂, |NHC=(O) NH₂, —NHSO₂H, —NHC=(O)H, —NHC(O)—OH, —NHOH, —OCF₃, —OCHF₂, unsubstituted alkyl, unsubstituted heteroalkyl, unsubstituted cycloalkyl, unsubstituted heterocycloalkyl, unsubstituted aryl, unsubstituted heteroaryl, and
[1047] alkyl, heteroalkyl, cycloalkyl, heterocycloalkyl, aryl, heteroaryl, substituted with at least one substituent selected from:
[1048] oxo, halogen, —CF₃, —CN, —OH, —NH₂, —COOH, —CONH₂, —NO₂, —SH, —SO₃H, —SO₄H, —SO₂NH₂, |NHNH₂, ONH₂, NHC=(O)NHNH₂, |NHC=(O) NH₂, —NHSO₂H, —NHC=(O)H, —NHC(O)—OH, —NHOH, —OCF₃, —OCHF₂, unsubstituted alkyl, unsubstituted heteroalkyl, unsubstituted cycloalkyl, unsubstituted heterocycloalkyl, unsubstituted aryl, unsubstituted heteroaryl, and
[1049] alkyl, heteroalkyl, cycloalkyl, heterocycloalkyl, aryl, heteroaryl, substituted with at least one substituent selected from: oxo, halogen, —CF₃, —CN, —OH, —NH₂, —COOH, —CONH₂, —NO₂, —SH, —SO₃H, —SO₄H, —SO₂NH₂, NHNH₂, ONH₂, NHC=(O)NHNH₂, |NHC=(O) NH₂, —NHSO₂H, —NHC=(O)H, —NHC(O)—OH, —NHOH, —OCF₃, —OCHF₂, unsubstituted alkyl, unsubstituted heteroalkyl, unsubstituted cycloalkyl, unsubstituted heterocycloalkyl, unsubstituted aryl, unsubstituted heteroaryl.

[1050] A “size-limited substituent” or “size-limited substituent group,” as used herein, means a group selected from all of the substituents described above for a “substituent group,” wherein each substituted or unsubstituted alkyl is a substituted or unsubstituted C₁-C₂₀ alkyl, each substituted or unsubstituted heteroalkyl is a substituted or unsubstituted 2 to 20 membered heteroalkyl, each substituted or unsubstituted cycloalkyl is a substituted or unsubstituted C₃-C₈ cycloalkyl, each substituted or unsubstituted heterocycloalkyl is a substituted or unsubstituted 3 to 8 membered heterocycloalkyl, each substituted or unsubstituted aryl is a substituted or unsubstituted C₆-C₁₀ aryl, and each substituted or unsubstituted heteroaryl is a substituted or unsubstituted 5 to 10 membered heteroaryl.

[1051] A “lower substituent” or “lower substituent group,” as used herein, means a group selected from all of the substituents described above for a “substituent group,” wherein each substituted or unsubstituted alkyl is a substituted or unsubstituted C₁-C₈alkyl, each substituted or unsubstituted heteroalkyl is a substituted or unsubstituted 2 to 8 membered heteroalkyl, each substituted or unsubstituted cycloalkyl is a substituted or unsubstituted C₃-C₇ cycloalkyl, each substituted or unsubstituted heterocycloalkyl is a substituted or unsubstituted 3 to 7 membered heterocycloalkyl, each substituted or unsubstituted aryl is a substituted or unsubstituted C₆-C₁₀ aryl, and each substituted or unsubstituted heteroaryl is a substituted or unsubstituted 5 to 9 membered heteroaryl.

[1052] In some embodiments, each substituted group described in the compounds herein is substituted with at least one substituent group. More specifically, in some embodiments, each substituted alkyl, substituted heteroalkyl, substituted cycloalkyl, substituted heterocycloalkyl, substituted aryl, substituted heteroaryl, substituted alkylene, substituted heteroalkylene, substituted cycloalkylene, substituted heterocycloalkylene, substituted arylene, and/or substituted heteroarylene described in the compounds herein are substituted with at least one substituent group. In other embodiments, at least one or all of these groups are substituted with at least one size-limited substituent group. In other embodiments, at least one or all of these groups are substituted with at least one lower substituent group.

[1053] In other embodiments of the compounds herein, each substituted or unsubstituted alkyl may be a substituted or unsubstituted C₁-C₂₀ alkyl, each substituted or unsubstituted heteroalkyl is a substituted or unsubstituted 2 to 20 membered heteroalkyl, each substituted or unsubstituted cycloalkyl is a substituted or unsubstituted C₃-C₈ cycloalkyl, each substituted or unsubstituted heterocycloalkyl is a substituted or unsubstituted 3 to 8 membered heterocycloalkyl, each substituted or unsubstituted aryl is a substituted or unsubstituted C₆-C₁₀ aryl, and/or each substituted or unsubstituted heteroaryl is a substituted or unsubstituted 5 to 10 membered heteroaryl. In some embodiments of the compounds herein, each substituted or unsubstituted alkylene is a substituted or unsubstituted C₁-C₂₀ alkylene, each substituted or unsubstituted heteroalkylene is a substituted or unsubstituted 2 to 20 membered heteroalkylene, each substituted or unsubstituted cycloalkylene is a substituted or unsubstituted C₃-C₈ cycloalkylene, each substituted or unsubstituted heterocycloalkylene is a substituted or unsubstituted 3 to 8 membered heterocycloalkylene, each substituted or unsubstituted arylene is a substituted or unsubstituted C₆-C₁₀ arylene, and/or each substituted or unsubstituted heteroarylene is a substituted or unsubstituted 5 to 10 membered heteroarylene.

[1054] In some embodiments, each substituted or unsubstituted alkyl is a substituted or unsubstituted C₁-C₈ alkyl, each substituted or unsubstituted heteroalkyl is a substituted or unsubstituted 2 to 8 membered heteroalkyl, each substituted or unsubstituted cycloalkyl is a substituted or unsubstituted C₃-C₇ cycloalkyl, each substituted or unsubstituted heterocycloalkyl is a substituted or unsubstituted 3 to 7 membered heterocycloalkyl, each substituted or unsubstituted aryl is a substituted or unsubstituted C₆-C₁₀ aryl, and/or each substituted or unsubstituted heteroaryl is a substituted or unsubstituted 5 to 9 membered heteroaryl. In some embodiments, each substituted or unsubstituted alkylene is a substituted or unsubstituted C₁-C₈ alkylene, each substituted or unsubstituted heteroalkylene is a substituted or unsubstituted 2 to 8 membered heteroalkylene, each substituted or unsubstituted cycloalkylene is a substituted or unsubstituted C₃-C₇ cycloalkylene, each substituted or unsubstituted heterocycloalkylene is a substituted or unsubstituted 3 to 7 membered heterocycloalkylene, each substituted or unsubstituted arylene is a substituted or unsubstituted C₆-C₁₀ arylene, and/or each substituted or unsubstituted heteroarylene is a substituted or unsubstituted 5 to 9 membered heteroarylene. In some embodiments, the compound is a chemical species set forth in the Examples section, figures, or tables below.

[1055] Certain compounds of the present disclosure possess asymmetric carbon atoms (optical or chiral centers) or double bonds; the enantiomers, racemates, diastereomers, tautomers, geometric isomers, stereoisometric forms that may be defined, in terms of absolute stereochemistry, as (R)- or (S)- or, as (D)- or (L)- for amino acids, and individual isomers are encompassed within the scope of the present disclosure. The present disclosure is meant to include compounds in racemic and optically pure forms. Optically active (R)- and (S)-, or (D)- and (L)-isomers may be prepared using chiral synthons or chiral reagents, or resolved using conventional techniques. When the compounds described herein contain olefinic bonds or other centers of geometric asymmetry, and unless specified otherwise, it is intended that the compounds include both E and Z geometric isomers.

[1056] As used herein, the term “isomers” refers to compounds having the same number and kind of atoms, and hence the same molecular weight, but differing in respect to the structural arrangement or configuration of the atoms.

[1057] The term “tautomer,” as used herein, refers to one of two or more structural isomers which exist in equilibrium and which are readily converted from one isomeric form to another.

[1058] It will be apparent to one skilled in the art that certain compounds of this disclosure may exist in tautomeric forms, all such tautomeric forms of the compounds being within the scope of the disclosure.

[1059] Unless otherwise stated, structures depicted herein are also meant to include all stereochemical forms of the structure; i.e., the R and S configurations for each asymmetric center. Therefore, single stereochemical isomers as well as enantiomeric and diastereomeric mixtures of the present compounds are within the scope of the disclosure.

[1060] Unless otherwise stated, structures depicted herein are also meant to include compounds which differ only in the presence of one or more isotopically enriched atoms. For example, compounds having the present structures except for the replacement of a hydrogen by a deuterium or tritium, or the replacement of a carbon by ¹³C- or ¹⁴C-enriched carbon are within the scope of this disclosure.

[1061] The compounds of the present disclosure may also contain unnatural proportions of atomic isotopes at one or more of the atoms that constitute such compounds. For example, the compounds may be radiolabeled with radioactive isotopes, such as for example tritium (³H), iodine-125 (¹²⁵I), or carbon-14 (¹⁴C). All isotopic variations of the compounds of the present disclosure, whether radioactive or not, are encompassed within the scope of the present disclosure.

[1062] It should be noted that throughout the application that alternatives are written in Markush groups, for example, each amino acid position that contains more than one possible amino acid. It is specifically contemplated that each member of the Markush group should be considered separately, thereby comprising another embodiment, and the Markush group is not to be read as a single unit. [00598]“Analog” or “analogue” is used in accordance with its plain ordinary meaning within Chemistry and Biology and refers to a chemical compound that is structurally similar to another compound (i.e., a so-called “reference” compound) but differs in composition, e.g., in the replacement of one atom by an atom of a different element, or in the presence of a particular functional group, or the replacement of one functional group by another functional group, or the absolute stereochemistry of one or more chiral centers of the reference compound. Accordingly, an analog is a compound that is similar or comparable in function and appearance but not in structure or origin to a reference compound.

[1063] Moreover, where a moiety is substituted with an R substituent, the group may be referred to as “R-substituted.” Where a moiety is R-substituted, the moiety is substituted with at least one R substituent and each R substituent is optionally different. Where a particular R group is present in the description of a chemical genus (such as Formula (I)), a Roman alphabetic symbol may be used to distinguish each appearance of that particular R group. For example, where multiple R¹³ substituents are present, each R¹³ substituent may be distinguished as R^{13A}, R^{13B}, R^{13C}, R^{13D}, etc., wherein each of R^{13A}, R^{13B}, R^{13C}, R^{13D}, etc. is defined within the scope of the definition of R¹³ and optionally differently.

[1064] A “detectable moiety” as used herein refers to a moiety that can be covalently or noncovalently attached to a compound or biomolecule that can be detected for instance, using techniques known in the art. In embodiments, the detectable moiety is covalently attached. The detectable moiety may provide for imaging of the attached compound or biomolecule. The detectable moiety may indicate the contacting between two compounds. Exemplary detectable moieties are fluorophores, antibodies, reactive dies, radio-labeled moieties, magnetic contrast agents, and quantum dots. Exemplary fluorophores include fluorescein, rhodamine, GFP, coumarin, FITC, Alexa fluor, Cy3, Cy5, BODIPY, and cyanine dyes. Exemplary radionuclides include Fluorine-18, Gallium-68, and Copper-64. Exemplary magnetic contrast agents include gadolinium, iron oxide and iron platinum, and manganese.

### VII. EXAMPLES

### Example 1

### Presence of Three Subgroups in Small Bowel Resection Expression Data

[1065] A total of 139 Caucasian CD patients were included in this study. Transcriptomic data was generated using uninvolved ileal tissue from CD patients who underwent SB resection using methods described in VanDussen, K. L., et al., Genetic variants synthesize to produce paneth cell phenotypes that define subtypes of Crohn's disease. Gastroenterology, 2014. 146(1): p. 200-9. The data was generated in two batches (n=100, n=57) and analyzed separately or as a merged dataset.

### Clinical Phenotyping and Genotyping

[1066] Clinical data, including patients' gender, age at diagnosis, disease location and behavior (according to the Montreal Classification) and surgical history were collected as described Genotyping was performed at Cedars-Sinai Medical Center using the Illumina Immuno-BeadChip array. Markers were excluded from analysis based on: Hardy-Weinberg Equilibrium p≤0.001; genotyping rate <98%; minor allele frequency <5%. Related individuals (Pi-hat scores >0.25) were identified using identity-by-descent and excluded from analysis using PLINK. Admixture was used to generate ethnicity proportion estimations for all individuals. Only subjects identified by admixture as Caucasian (proportion ≥0.75) were included in the analysis; thus, a total 139 independent Caucasian samples were retained in analysis. Principal component analysis was performed using Eigenstrat and top two principal components were included as covariates in the analysis to adjust for potential population sub-structure. We performed genetic associations (logistic regression with PC adjustment) for the presence or absence of a given sub-group (CD1/CD2/CD3) using genotype data for the 139 subjects in the combined cohort. Results indicate that the CD3 sub-group which was associated with pCD had significant genetic associations with SNPs (intronic rs888338, OR=3.5, P=6.5×10-4) in DAPK1, a pCD risk gene locus. FIGS. 8A-8B show Manhattan plot for associations with p<0.05 for CD1 and CD3 phenotypes, respectively. Interestingly, some of the top SNPs associated with CD3 sub-group belong to genes also associated with very-early onset-IBD (VEO-IBD), including genes (SKIV2L and DAPK1) (FIG. 8B).

### Sample Cohorts

[1067] Uninflamed tissue from formalin-fixed paraffin-embedded (FFPE) small bowel resection margins of subjects requiring surgery at Cedars-Sinai Medical Center for Crohn's disease was identified Whole-thickness ileal tissue was scraped from the FFPE tissue sections followed by RNA extraction using the RNeasy FFPE kit (Qiagen) according to the manufacturer's instructions. The Transplex Whole Transcriptome Amplification kit (WTA2; Sigma) was used for cDNA synthesis and amplification. Subsequent purification of the cDNA product was performed with the PCR Purification kit (Qiagen). Sample quality was confirmed using the Agilent Bioanalyzer. For samples passing quality control, Cy5 labeling with the ULST Fluorescent Labeling kit (Kreatech) and hybridization (performed in duplicate for each sample) to Whole Human Genome 4x44k Microarrays (Agilent) was performed.

### Expression Data Processing and Clustering

[1068] Single channel microarray expression data extracted using Agilent feature extraction software was received from Genome Technology Access Center at Washington University in St. Louis. Raw expression data available in technical duplicates was normalized using LIMMA package implemented in R version 3.2.1. All the gene expression data including the sample meta data, Agilent raw data along with the processed data for all the 157 samples can be accessed at Gene Expression Omnibus using accession number GSE120782. The expression data preprocessing induded background correction of the expression data, followed by log 2-transformation and quantile-normalization. Unsupervised hierarchical clustering of expression data was used to remove outlier subjects.

[1069] Differential gene expression analysis was done by class comparison in BRB array tools using expression corresponding to each of the three sub-groups. Sometimes, a gene filter cut-off was applied during class comparison where a gene was excluded if <20% of expression data had at least a 1.5-fold change in either direction from gene's median value. Multiple probes per gene were used to verify expression analysis. The “removebatcheffect” function in LIMMA R package was used to remove the batch effects between the SB85 and SB54 datasets.

[1070] The presence of three patient subgroups in our combined expression data was validated using a non-heuristic, model-based clustering method. This was implemented using “mclust” R package which is based on using Gaussian finite mixture models. In this method, the data is assumed to be part of a distribution that is a mixture of two or more subgroups where each group is modeled by a Gaussian distribution with a specific mean vector, covariance matrix and associated probability in the mixture. The advantage of using model-based clustering is the recommendation of number of clusters/subgroups present and the best model to fit the data Using the Bayesian information criterion score, an optimal number of three subgroups were recommended by application of mclust package on the merged dataset (FIG. 7A, B).

### Results

[1071] Sample correlation was analyzed of normalized, background corrected expression data after removing outliers and non-Caucasian samples from the larger cohort of 100 samples. This cohort is herein referred to as SB85 (post quality control, n=85). FIG. 1A shows the heat map of Pearson correlation coefficient between the samples using normalized expression probe data in SB85 cohort. The heat map revealed the presence of three patient sub-groups. The dimensionality of the expression dataset was reduced using principal component analysis (PCA) and the top three principal components (that explained most of the variance in expression data) also indicated that the samples clustered into three sub-groups. Multiple clustering methods (hierarchical, k-means clustering and model-based clustering) were applied to allocate samples to each sub-group. FIG. 1B shows the PCA plot for the SB85 cohort highlighting the three CD patient sub-groups, CD1, CD2 and CD3. The three subgroups in SB85 were homogenous in terms of Jewish ethnicity and disease behavior.

[1072] Next, the two expression cohorts were merged into a combined cohort to increase the sample size to perform further associations as we are underpowered to draw conclusive results using only the SB54 dataset. Batch effects were removed, and the two datasets were merged (combined cohort SB139; FIG. 1C). Both SB85 and SB54 cohorts are similar in terms of baseline characteristics. There were no statistically significant differences in average age at diagnosis (24 years for both cohorts), gender, disease location and behavior, pCD occurrence and time to second surgery or follow-up between the two cohorts. The PCA plot of our combined cohort SB139 confirmed the presence of three distinct patient subgroups (FIG. 1D) using k-means/hierarchical clustering. CD1 and CD3 subgroups were found to be the most distant as seen in the 3-D PCA plot (FIGS. 1B, C, D). The presence of three patient subgroups was validated in Cedars-Sinai Medical Center combined expression data using a non-heuristic, model-based clustering method. A comparison of the three subgroups from model-based clustering and k-means/hierarchical clustering indicated mostly similar sorting of samples into the three-subgroups (FIGS. 1D and 1E).

### Example 2

Clinical Variables Associated with the Patient Subgroups Indicate CD3 Cluster to be More Severe

[1073] Clinical data, including the current age, gender, age at diagnosis, disease location and behavior (according to the Montreal Classification) and surgical history of the subjects were collected Phenotypic differences in the transcriptomic-based patient subgroups and clinical variables associated with the subjects were investigated Table 7 shows baseline clinical characteristics of each of the three patient subgroups in the combined cohort (Total, n=139; CD1, n=26; CD2, n=88 and CD3, n=25). Clinical differences between the most distant subgroups (CD1 and CD3) of SB139 were observed. CD3 was associated with higher occurrence of second surgery (OR=5.07, P=0.016) and presence of pCD (OR=3.61, P=0.036) (Table 8). No significant differences were found when comparing the three subgroups simultaneously for differences in various clinical phenotypes, including disease location, CD disease behavior information based on Montreal classification (described as B1, nonstricturing, nonpenetrating; B2, stricturing; and B3, penetrating diseases) and occurrence of second surgery.

[1074] Gender was also a predictor of clustering (Table 9), with the more severe CD3 subgroup consisting of a higher percentage of females Without being bound by any particular theory, women may be at higher risk of inflammation associated diseases due to enhanced immune activation in the gut. Given these gender differences, enrichment of females in CD3 group may indicate exacerbation of severe CD in females. Table 9 provides phenotype data, therapy and smoking habit prior to first surgery labeled by sample sub-groups.

[1075] Survival analysis using time from first surgery to recurrence or last follow-up indicated the time to recurrence in CD3 was shorter than in CD1 (p=0.02) (FIG. 2A). The median time to recurrence from first surgery in months for CD1 was 10, CD2 was 8 and CD3 was shortest at 6 months (FIG. 2A). Compared to CD1, CD3 was enriched for subjects with increased disease recurrence after first surgery (OR=6.78, P=0.04). Using time from first to second surgery or last follow-up within 5 years suggested a greater proportion without second surgery in CD1 compared to CD3 (p=0.08) (FIG. 2B). These data suggest that the CD3 cluster contains individuals with a more severe disease course. Given our small sample size, in separate multivariate models with gender as covariate, significance of association of clustering (CD1 and CD3) with pCD dropped (OR=2.82, P=0.1) while occurrence of second surgery remained significant (OR=4.62, P=0.03).

TABLE 7
Baseline characteristics of patients in three subgroups of SB139 cohort

| | CD1 | CD2 | CD3 |
|---|---|---|---|
| | (n = 26) | (n = 88) | (n = 25) |
| Age at diagnosis, yr ± SD | 21.89 ± 12.99 | 25.38 ± 13.61 | 22.94 ± 11.02 |
| Gender (Female), n (%) | 12 (46.1) | 38 (43.1) | 20 (80) |
| Disease location, n (%) | | | |
| L1, ileum | 14 (53.1) | 39 (44.3) | 9 (36) |
| L2, colon | 0 (0) | 2 (2.3) | 0 (0) |
| L3, ileocolon | 12 (46.1) | 44 (50) | 16 (64) |
| L4, upper GI | 4 (15.3) | 7 (7.9) | 3 (12) |
| Disease behavior, n (%) | | | |
| B1, nonstricturing | 1 (3.8) | 2 (2.2) | 2 (8) |
| nonpenetrating | | | |
| B2, stricturing | 11 (42.3) | 38 (43.1) | 13 (52) |
| B3, penetrating | 14 (53.8) | 48 (54.5) | 10 (40) |
| Perianal disease, n (%) | 6 (27.7) | 24 (27.2) | 13 (52) |
| Second surgery, n (%) | 4 (15.4) | 24 (27.2) | 12 (48) |
| Recurrence, n (%) | 12 (46) | 23 (26) | 19 (76) |

TABLE 8
The most distant sub-groups, CD1 and CD3 in merged SB139 are clinically different.

| | | | | | (CD3, | | | |
|---|---|---|---|---|---|---|---|---|
| | (CD1, n = 26) | | | | n = 25) | | | |
| Phenotype | No | Yes | % Yes | No | Yes | % Yes | OR(95% C1) | P |
| Second | 22 | 4 | 15.38 | 13 | 12 | 48.00 | 5.07(1.44-21.31) | 0.016 |
| Surgery | | | | | | | | |
| Perianal | 20 | 6 | 27.27 | 12 | 13 | 52.00 | 3.61(1.12-12.75) | 0.036 |
| Disease | | | | | | | | |
| | | | % | | | % | | |
| | Male | Female | Female | Male | Female | Female | OR(95% C1) | P |
| Gender | 14 | 12 | 46.15 | 5 | 20 | 80.00 | 4.66(1.41-17.59) | 0.015 |

TABLE 9
Phenotype data, therapy and smoking habit prior to first surgery
labeled by sample sub-groups

| | CD1 | CD2 | CD3 |
|---|---|---|---|
| | (n = 21) | (n = 69) | (n = 20) |
| Disease location, n (%) | | | |
| L1, ileum | 2(9.5) | 13(18.8) | 2(10) |
| L2, colon | 0 | 0 | 0 |
| L3, ileocolon | 17(81) | 53(76.8) | 17(85) |
| L4, upper GI | 2(9.5) | 3(4.3) | 1(5) |
| Disease behavior, n (%) | | | |
| B1, nonstricturing nonpenetrating | 0 | 1(1.4) | 2(10) |
| B2, stricturing | 6(28.5) | 28(40.6) | 6(30) |
| B3, penetrating | 15(71.4) | 40(58) | 12(60) |
| Smoking history, never smoked, n (%) | 19(90.4) | 53(77) | 15(75) |
| Positive family History of IBD, n (%) | 8(38) | 21(30.4) | 5(25) |
| Therapy, n (%) | | | |
| Pre-op 5-aminosalicylic acid (ASA) treatment | 17(81) | 45(65.2) | 16(80) |
| Pre-op Immunomodulator treatment | 13(62) | 30(43.5) | 10(50) |
| (Methotrexate/AZA/6-MP/Cyclosporine) | | | |
| Pre-op Anti-TNF treatment | 9(43) | 37(53.6) | 12(60) |
| (Infliximab/Adalimumab/Certolizumab) | | | |

### Example 3

Differential Gene Expression Across the Subgroups Reveal Specific Expression Signatures Associated with CD3 Compared to the Less Severe CD1 Sub-Group

[1076] A class comparison using gene expression corresponding to the three subgroups was performed. This gave a list of 4380 gene expression probes to be significantly different (FDR <0.001) between each of the pairs from the three subgroups. FIG. 3 shows the heat map of the differentially expressed (DE) genes in the three subgroups.

[1077] Table 10 provides the results of a pathway analysis performed. Pathway analysis identified eukaryotic initiation factor 2 (EIF2) signaling actin cytoskeleton and integrin signaling to be down-regulated in CD3 versus CD1 as indicated by negative activation z-scores, while organismal death was activated in CD3 versus CD1 subgroups. Pathway analyses using an expanded list of >18,000 DE genes also indicated that EIF2 signaling was down-regulated in CD3 versus CD1 sub-groups, while RhoGD1 signaling was activated in CD3 compared to CD1.

TABLE 10
Pathway Analysis Results-Signaling Pathways

| | CD3 v. | CD2 vs. | CD2 vs. |
|---|---|---|---|
| Pathway | CD1 | CD3 | CD1 |
| EIF2 Signaling | − | + | − |
| Integrin Signaling | − | + | − |
| NRF2-mediated Oxidative stress | − | + | − |
| Fcγ Receptor-mediated phagocytosis in | − | + | − |
| Macrophages | | | |
| Ephrin Receptor Signaling | − | + | − |
| Actin Cytoskeleton | − | + | − |
| ERK5 Signaling | − | + | − |
| Wnt/β-catenin Signaling | − | + | − |
| Remodeling of Epethial Adherens Junctions | − | + | − |
| Regulation of Actin-based Motility by Rho | − | + | − |
| Leukocyte Extravasation SIgnaling | − | + | − |
| Regulation of eIF4 and p70S6K Signaling | + | + | − |
| RhoGDI Signaling | + | − | + |
| RhoA Signaling | − | + | − |
| Cdc42 Signaling | − | + | − |
| Signaling by Rho Family GPTases | − | + | − |

[1078] Next, a pathway analysis was performed for cellular processes, which are provided in Table 11. Organismal death, morbidity, and cell death of osteosarcoma are upregulated in the CD3 cohort as compared to the CDT cohort. In contrast, Infection and cell viability appear to be down regulated.

TABLE 11
Pathway Analysis-Cellular Processes

| | CD3 v. | CD2 vs. | CD2 vs. |
|---|---|---|---|
| Pathway | CD1 | CD3 | CD1 |
| Organismal Death | + | + | − |
| Morbidity or mortality | + | + | − |
| Cell death or osteosarcoma cells | + | + | − |
| Infection by RNA virus | − | − | + |
| Infection by Retroviridae | − | − | + |
| HIV infection | − | − | + |
| Infection by HIV-1 | − | − | + |
| Viral Infection | − | − | + |
| Infection of cells | − | − | + |
| Invasion of cells | − | − | + |
| Infection of kidney cell lines | − | − | + |
| Infection of epithelial cell lines | − | − | + |
| Infection of embryotic cell lines | − | − | + |
| Cell viability of tumor cell lines | − | − | + |
| Cell viability | − | − | + |

### Example 4

### Overlap of Genetic and Gene Expression Signatures Defining the CD3 Sub-Group Reveal Specific Pathways Driving the CD3 Phenotype

[1079] Differences were identified in genetic loci underlying susceptibility and associated disease severity for the three CD subgroups that were identified via transcriptomics (FIGS. 8A-8C). Results indicate that the CD3 sub-group which was associated with pCD had significant genetic associations with SNPs (intronic rs888338, OR=3.5, P=6.5×10-4) inDAPK1, a pCD risk gene locus. FIGS. 8A-8B show Manhattan plot for associations with p<0.05 for CD1 and CD3 phenotypes, respectively. Interestingly, some of the top SNPs associated with CD3 sub-group belong to genes also associated with very-early onset-IBD (VEO-IBD), including genes (SKJV2L and DAPK1) (FIG. 8B). FIG. 8C shows that the CD3 sub-group is associated with SNPs in DAPK1 gene, a previously reported pCD phenotype locus.

[1080] Candidate genes that appeared in the genetic associations as well as DE gene list were analyzed. A total of 174 genes associated specifically with either CD1 or CD3, and were also differentially expressed between the two subgroups (Table 4). Pathway analyses using these genes and the associated expression fold-changes between CD3 versus CD1 subgroups indicated EIF2 signaling was down-regulated in CD3 compared to CD1 and cAMP-mediated signaling was activated in CD3 compared to CD1 (See Table 12).

TABLE 12
Pathway Analysis of 174 Gene Signature Defining CD3 Sub-group

| Pathway | CD3 v. CD1 |
|---|---|
| EIF2 Signaling | − |
| cAMP-mediate signaling | + |
| ERK/MAPK Signaling | − |
| RhoGDI Signaling | + |
| Protein Kinase A Signaling | + |
| Production of Nitric Oxide and Reactive Oxygen Species | − |

[1081] Key genes, including apolipoprotein B (APOB), phosphodiesterase 4C (PDE4C), protein kinase C alpha (PRKCA) and SMAD family member 3 (SNMAD3), that are involved in pathways differentially regulated between CD3 and CD1 subgroups. Oncostatin-M receptor (OSMR) was upregulated in CD3 and high expression of oncostatin-M (OS) and its receptor, OSMR has been reported to be associated with disease severity and non-response to anti-TNF therapy. SMAD3 was down-regulated in the CD3 sub-group and knock-out mice for SMAD3 have impaired intestinal mucosal healing. SMAD3 variants have been shown to be associated with risk for recurring surgery in CD patients. SH3 and multiple ankyrin repeat domains 3 (SHANK3) was downregulated in CD3, which is consistent with a reported role of SHANK3 in regulation of intestinal barrier function, with SHANK3 knock-out mice showing impaired epithelial barrier. Thus, key genes were identified based on genotype and/or differential expression that differentiate the clinically distinct CD1 and CD3 patient subgroups (Table 13).

[1082] Polymorphism associated with an up- or down-regulation of the 174 genes are provided in Table 2 in the CD3 population. A negative fold change value in Table 2 indicates that the polymorphism is associated with a downregulation of the gene, whereas a positive fold change value in Table 2 indicates that the polymorphism is associated with an upregulation of the gene. Without being bound by any particular theory, it would be expected that a transcriptomic risk signature (TRSig) may be detected either by detecting a level of expression of one or more genes from Table 4 directly, or by detecting a presence of one or more polymorphisms associated with that expression.

TABLE 13
Keys genes differentiating the clinically distinct CD3 and CD1
patient subgroups based on genotype and expression

| | CD3 vs | Genetic | |
|---|---|---|---|
| | CD1 fold | association | |
| Gene | change | (p < 0.05) | Reference |
| PDE4C | 2.12 | Associations | PDE4 Inhibition and |
| | (11 probes) | with CD3 | IBD: A Novel |
| | | | Therapeutic Avenue |
| ICAM3 | 2.41 | Associations | Increased Cell Adhesion |
| | | with CD3 | Molecules, PECAM-1, |
| | | | ICAM-3, or VCAM-1, |
| | | | Predict Increased |
| | | | Risk for Flare in Patients |
| | | | With Quiescent IBD |
| SMAD3 | −2.41 | Association | Smad3 knockout mice |
| | (10 probes) | with CD1 | exhibit impaired |
| | | | intestinal mucosal healing; |
| | | | SMAD3 gene |
| | | | variant is a risk factor |
| | | | for recurrent surgery in |
| | | | patients with Crohn's |
| | | | disease |
| IL18BP | 1.476 | Association | Interleukin-18 and its |
| | | with CD3 | Binding Protein in |
| | | | Patients with IBD |
| | | | during Remission and |
| | | | Exacerbation |
| DAPK1 | NA | Associations | Perianal Crohn's Disease |
| | | with CD3 | is Associated with |
| | | | Distal Colonic Disease, |
| | | | Stricturing Disease |
| | | | Behavior, IBD-Associated |
| | | | Serologies and |
| | | | Genetic Variation |
| | | | in the JAK-S |
| SHANK3 | −2.59 | NA | SHANK3 Regulates |
| | | | Intestinal Barrier |
| | | | Function Through |
| | | | Modulating ZO-1 |
| | | | Expression Through |
| | | | the PKCe-dependent |
| | | | Pathway |
| OSMR | 1.95 | NA | Oncostatin M drives |
| | | | intestinal inflammation |
| | | | and predicts response |
| | | | to tumor necrosis |
| | | | factor-neutralizing |
| | | | therapy in patients with |
| | | | IBD |

### Example 5

eOTL Analyses Reveal Differences in CD1 and CD3 Sub-Groups

[1083] Using the genetic and transcriptomic data for SB139 cohort, expression quantitative trait loci (eQTL) analyses were performed to determine genetic loci that directly regulate local gene expression in the CD subgroups of varying severity with CD1 being less severe and CD3 being more severe using the available expression and genotype data for n=26 (CD1) and n=26 (CD3) independent Caucasian samples. Cis-eQTL analysis revealed that CD1 and CD3 subgroups have mostly distinct signatures. All the cis-eQTLs with FDR<0.001 were unique to either CD1 or CD3 subgroup with no overlap.

eQTL Mapping

[1084] eQTL mapping was implemented in Matrix eQTL R package using the available expression and genotype data for n=26 (CD1) and n=26 (CD3) independent Caucasian samples. eQTLs were also performed considering all the 139 samples together as part of determining eGenes to calculate TRS. Associations between genotype and probe expression level were performed using a linear regression model with additive genotype effects. All associations were adjusted for gender, age and population sub-structure using the first two principal components of genetic data. Gene bounds were defined using a 1 Mb window around the transcription start position of given gene as obtained from UCSC Genome Browser. For cis-eQTL mapping, a 1 Mb cis distance from gene bounds was used. Cis-eQTLs were defined as association signals from SNPs located within 1 Mb from each of the gene bounds. False discovery rates (FDR) were estimated to correct for multiple testing using Matrix eQTL according to the Benjamini and Hochberg method.

### Pathway Analysis

[1085] Pathway analysis was accomplished through the use of Qiagen's Ingenuity® Pathway Analysis (IPA®, Qiagen, Redwood City, www.qiagen.com/ingenuity). Pathway analysis using the set of DE genes between the subgroups was performed in Ingenuity pathway (IPA) along with a diseases and Biological function analysis. Class comparison analysis in BRB array tools with the gene-filter criterion turned on gave a list of 4380 DE gene expression probes while with the filter turned off gave a much larger (>18000) list of DE expression probes between the sub-groups.

[1086] Comparison pathway analyses in IPA using eGenes (genes from unique cis-eQTL pairs to either CD1 or CD3 with p<1e-08, FDR<0.001) demonstrated CD3 subgroup was enriched in Wnt/beta-catenin signaling and regulation of epithelial-mesenchymal transition while CD1 subgroups was enriched in pathways related to inflammation such as antigen presentation and OX40 signaling (FIG. 4A).

[1087] The genes identified by overlapping eQTL and pathway analyses are provided in Table 3, which are the genes used to calculate the transcriptional risk score (TRS).

### Example 6

### Transcriptional Risk Scores

[1088] Transcriptional risk score (TRS) was calculated for the SB139 cohort using the methods described in the work by Marigorta, U. M., et al., Transcriptional risk scores link GWAS to eQTLs and predict complications in Crohn's disease., in Nature Genetics. 2017. p. 1517-1521. 122 among 232 known IBD loci are either cis-eQTLs or in strong LD (r2>0.8) with at least one cis-eQTL in peripheral blood. This corresponds to a total of 163 (157 unique) corresponding eGenes, that is, ˜1.3 candidate gene per SNP. We determined 139/157 eGenes to be present with a nominal p value <0.05 in cis-eQTL dataset of all the 139 samples. All 139 eGenes had cis-eQTLs in Jostins-Liu known region in SB139 cis-eQTL dataset. Transcript abundance in SB139 cohort for the short-listed 139 eGenes was standardized and polarized according to direction of risk Transcript abundance where low expression was associated with risk were flipped Summation over all eGenes gave TRS which was further standardized.

[1089] TRS calculated using expression data of eGenes (eQTL associated genes) in the SB139 cohort (see methods) was found to be associated with the three CD subgroups (p<0.0001, Kruskal-Wallis test). CD3 subgroup was associated with significantly higher score compared to CD1 (p=0.0002, Mann-Whitney test). CD2 subgroup was intermediate with a heterogeneous mix of subjects with both high and low TRS scores (FIG. 4B). Consistent with the conclusions from the Marigorta et al., study, the calculated TRS scores in our study are associated with the sub-population with more severe clinical disease.

### Example 7

Cell-Type Specific Signatures Associated with Subgroups

[1090] Enrichment of specific cell-types associated gene signatures were performed in the SB resection tissue samples which could possibly lead to the subgroups that identified using the ileal tissue expression. xCell was used to generate cell-type specific signatures associated with the three subgroups. The most pronounced cell-type differences, represented by the gene signature, were in the eosinophil and NKT enrichment score as highlighted in the left and right figure insets in FIG. 5A-5B (eosinophil). CD3 had significantly higher eosinophil enrichment scores compared to the two other subgroups (p<0.0001) (FIG. 5A-5B). The national killer T (NKT) cell type enrichment scores were associated with the subgroups in a similar way (FIG. 5C).

[1091] To validate the presence of eosinophils (EOS) in the SB resected tissue, EOS were manually counted using H&E staining of FFPE slides for 67 out of the 139 patients (CD1=18, CD2=27 and CD3=22) (FIG. 5B). Slides were scanned at 20× and eosinophils were manually counted by a trained Pathologist in 6 (300×300 micron) random fields of the lamina propria with areas with outliers or artifacts excluded Results indicate that all the samples had EOS present, however, a statistically significant difference in the EOS counts across the three subgroups was not observed. These results indicate that other cellular mechanisms such as EOS activation, rather than differential cell count, may be involved in pathogenesis in CD3 patients.

### Example 8

### Phase 1A Clinical Trial

[1092] A phase 1 clinical trial is performed to evaluate the safety, tolerability, pharmacokinetics and pharmacodynamics of an inhibitor of PDE4 and/or agonist of ADCY7 in subjects positive for the risk genotype and/transcriptomic risk profile.

[1093] Single ascending dose (SAD) arms: Subjects in each group (subjects are grouped based on the presence or absence of risk genotype or transcriptomic risk profile) receive either a single dose of the antibody or a placebo. Exemplary doses are 1, 3, 10, 30, 100, 300, 600 and 800 mg of antibody. Safety monitoring and PK assessments are performed for a predetermined time. Based on evaluation of the PK data, and if the antibody is deemed to be well tolerated, dose escalation occurs, either within the same groups or a further group of healthy subjects. Dose escalation continues until the maximum dose has been attained unless predefined maximum exposure is reached or intolerable side effects become apparent.

[1094] Multiple ascending dose (MAD) arms: Subjects in each group (subjects are grouped based on the presence or absence of rs911605A genotype) receive multiple doses of the antibody or a placebo. The dose levels and dosing intervals are selected as those that are predicted to be safe from the SAD data Dose levels and dosing frequency are chosen to achieve therapeutic drug levels within the systemic circulation that are maintained at steady state for several days to allow appropriate safety parameters to be monitored. Samples are collected and analyzed to determination PK profiles.

[1095] Inclusion Criteria: Subjects of non-childbearing potential between the ages of 18 and 55 years having obstructive Crohn's disease. Female subjects of non-childbearing potential must meet at least one of the following criteria: (1) achieved postmenopausal status, defined as: cessation of regular menses for at least 12 consecutive months with no alternative pathological or physiological cause; and have a serum follicle stimulating hormone (FSH) level within the laboratory's reference range for postmenopausal females; (2) have undergone a documented hysterectomy and/or bilateral oophorectomy; (3) have medically confirmed ovarian failure. All other female subjects (including females with tubal ligations and females that do not have a documented hysterectomy, bilateral oophorectomy and/or ovarian failure) will be considered to be of childbearing potential. Body Mass Index (BMI) of 17.5 to 30.5 kg/m2; and a total body weight >50 kg (110 lbs). Evidence of a personally signed and dated informed consent document indicating that the subject (or a legal representative) has been informed of all pertinent aspects of the study.

[1096] Two groups of subjects are selected: subjects having rs911605A genotype, and subjects lacking the genotype.

[1097] Exclusion Criteria: Evidence or history of clinically significant hematological, renal, endocrine, pulmonary, gastrointestinal, cardiovascular, hepatic, psychiatric, neurologic, or allergic disease (including drug allergies, but excluding untreated, asymptomatic, seasonal allergies at time of dosing) or than Crohn's disease. Subjects with a history of or current positive results for any of the following serological tests: Hepatitis B surface antigen (HBsAg), Hepatitis B core antibody (HBcAb), anti-Hepatitis C antibody (HCV Ab) or human immunodeficiency virus (HIV). Subjects with a history of allergic or anaphylactic reaction to a therapeutic drug. Treatment with an investigational drug within 30 days (or as determined by the local requirement, whichever is longer) or 5 half-lives or 180 days for biologics preceding the first dose of study medication. Pregnant females; breastfeeding females; and females of childbearing potential.

[1098] Primary Outcome Measures: Incidence of dose limiting or intolerability treatment related adverse events (AEs) [Time Frame: 12 weeks]. Incidence, severity and causal relationship of treatment emergent AEs (TEAEs) and withdrawals due to treatment emergent adverse events [Time Frame: 12 weeks]. Incidence and magnitude of abnormal laboratory findings [Time Frame: 12 weeks]. Abnormal and clinically relevant changes in vital signs, blood pressure (BP) and electrocardiogram (ECG) parameters [Time Frame: 12 weeks].

### Secondary Outcome Measures:

[1099] Single Ascending Dose: Maximum Observed Plasma Concentration (Cmax) [Time Frame: 12 weeks]. Single Ascending Dose: Time to Reach Maximum Observed Plasma Concentration (Tmax) [Time Frame: 12 weeks]. Single Ascending Dose: Area under the plasma concentration-time profile from time zero to 14 days (AUC14 days) [Time Frame: 12 weeks]. Single Ascending Dose: Area under the plasma concentration-time profile from time zero extrapolated to infinite time (AUCinf) [Time Frame: 12 weeks]. Single Ascending Dose: Area under the plasma concentration-time profile from time zero to the time of last quantifiable concentration (AUClast) [Time Frame: 12 weeks]. Single Ascending Dose: Dose normalized maximum plasma concentration (Cmax[dn]) [Time Frame: 12 weeks]. Single Ascending Dose: Dose normalized area under the plasma concentration-time profile from time zero extrapolated to infinite time (AUCinf[dn]) [Time Frame: 12 weeks]. Single Ascending Dose: Dose normalized area under the plasma concentration-time profile from time zero to the time of last quantifiable concentration (AUClast[dn]) [Time Frame: 12 weeks]. Single Ascending Dose: Plasma Decay Half-Life (t½) [Time Frame: 12 weeks]. Plasma decay half-life is the time measured for the plasma concentration to decrease by one half. Single Ascending Dose: Mean residence time (MRT) [Time Frame: 12 weeks]. Single Ascending Dose: Volume of Distribution at Steady State (Vss) [Time Frame: 6 weeks]. Volume of distribution is defined as the theoretical volume in which the total amount of drug would need to be uniformly distributed to produce the desired blood concentration of a drug. Steady state volume of distribution (Vss) is the apparent volume of distribution at steady-state. Single Ascending Dose: Systemic Clearance (CL) [Time Frame: 6]. CL is a quantitative measure of the rate at which a drug substance is removed from the body.

[1100] Multiple Ascending Dose First Dose: Maximum Observed Plasma Concentration (Cmax) [Time Frame: 12 weeks]. Multiple Ascending Dose First Dose: Time to Reach Maximum Observed Plasma Concentration (Tmax) [Time Frame: 12 weeks]. Multiple Ascending Dose First Dose: Area under the plasma concentration-time profile from time zero to time τ, the dosing interval where τ=2 weeks (AUCτ) [Time Frame: 12 weeks]. Multiple Ascending Dose First Dose: Dose normalized maximum plasma concentration (Cmax[dn]) [Time Frame: 12 weeks]. Multiple Ascending Dose First Dose: Dose normalized Area under the plasma concentration-time profile from time zero to time τ, the dosing interval where τ=2 weeks (AUCτ [dn]) [Time Frame: 12 weeks]. Plasma Decay Half-Life (t½) [Time Frame: 12 weeks]. Plasma decay half-life is the time measured for the plasma concentration to decrease by one half. Multiple Ascending Dose First Dose: Mean residence time (MRT) [Time Frame: 12 weeks]. Apparent Volume of Distribution (Vz/F) [Time Frame: 12 weeks]. Volume of distribution is defined as the theoretical volume in which the total amount of drug would need to be uniformly distributed to produce the desired plasma concentration of a drug. Apparent volume of distribution after oral dose (Vz/F) is influenced by the fraction absorbed Multiple Ascending Dose First Dose: Volume of Distribution at Steady State (Vss) [Time Frame: 12 weeks]. Volume of distribution is defined as the theoretical volume in which the total amount of drug would need to be uniformly distributed to produce the desired blood concentration of a drug. Steady state volume of distribution (Vss) is the apparent volume of distribution at steady-state. Multiple Ascending Dose First Dose: Apparent Oral Clearance (CL/F) [Time Frame: 12 weeks]. Clearance of a drug is a measure of the rate at which a drug is metabolized or eliminated by normal biological processes. Clearance obtained after oral dose (apparent oral clearance) is influenced by the fraction of the dose absorbed Clearance is estimated from population pharmacokinetic (PK) modeling. Drug clearance is a quantitative measure of the rate at which a drug substance is removed from the blood Multiple Ascending Dose First Dose: Systemic Clearance (CL) [Time Frame: 12 weeks]. CL is a quantitative measure of the rate at which a drug substance is removed from the body.

[1101] Multiple Ascending Dose Multiple Dose: Maximum Observed Plasma Concentration (Cmax) [Time Frame: 12 weeks]. Multiple Ascending Dose Multiple Dose: Time to Reach Maximum Observed Plasma Concentration (Tmax) [Time Frame: 12 weeks]. Multiple Ascending Dose Multiple Dose: Area under the plasma concentration-time profile from time zero to time τ, the dosing interval where τ=2 weeks (AUCt) [Time Frame: 12 weeks]. Multiple Ascending Dose Multiple Dose: Dose normalized maximum plasma concentration (Cmax[dn]) [Time Frame: 12 weeks]. Multiple Ascending Dose Multiple Dose: Dose normalized Area under the plasma concentration-time profile from time zero to time τ, the dosing interval where τ=2 weeks (AUCτ [dn]) [Time Frame: 12 weeks]. Multiple Ascending Dose Multiple Dose: Plasma Decay Half-Life (t½) [Time Frame: 12 weeks]. Plasma decay half-life is the time measured for the plasma concentration to decrease by one half Multiple Ascending Dose Multiple Dose: Apparent Volume of Distribution (Vz/F) [Time Frame: 12 weeks]. Volume of distribution is defined as the theoretical volume in which the total amount of drug would need to be uniformly distributed to produce the desired plasma concentration of a drug. Apparent volume of distribution after oral dose (Vz/F) is influenced by the fraction absorbed Multiple Ascending Dose Multiple Dose: Volume of Distribution at Steady State (Vss) [Time Frame: 12 weeks]. Volume of distribution is defined as the theoretical volume in which the total amount of drug would need to be uniformly distributed to produce the desired blood concentration of a drug. Steady state volume of distribution (Vss) is the apparent volume of distribution at steady-state.

[1102] Multiple Ascending Dose Multiple Dose: Apparent Oral Clearance (CL/F) [Time Frame: 12 weeks]. Clearance of a drug is a measure of the rate at which a drug is metabolized or eliminated by normal biological processes. Clearance obtained after oral dose (apparent oral clearance) is influenced by the fraction of the dose absorbed Clearance was estimated from population pharmacokinetic (PK) modeling. Drug clearance is a quantitative measure of the rate at which a drug substance is removed from the blood Multiple Ascending Dose Multiple Dose: Systemic Clearance (CL) [Time Frame: 12 weeks]. CL is a quantitative measure of the rate at which a drug substance is removed from the body. Multiple Ascending Dose Multiple Dose: Minimum Observed Plasma Trough Concentration (Cmin) [Time Frame: 12 weeks]. Multiple Ascending Dose Multiple Dose: Average concentration at steady state (Cav) [Time Frame: 12 weeks]. Multiple Ascending Dose Multiple Dose: Observed accumulation ratio (Rac) [Time Frame: 12 weeks]. Multiple Ascending Dose Multiple Dose: Peak to trough fluctuation (PTF) [Time Frame: 12 weeks]. Multiple Ascending Dose Additional Parameter: estimate of bioavailability (F) for subcutaneous administration at the corresponding intravenous dose [Time Frame: 12 weeks]. Immunogenicity for both Single Ascending Dose and Multiple Ascending Dose: Development of anti-drug antibodies (ADA) [Time Frame: 12 weeks].

### Example 9

### Phase 1B Clinical Trial

[1103] A phase 1B clinical trial is performed to evaluate the safety and efficacy of a compound described herein comprising an ADCY7 agonist and/or PDE4 inhibitor in participants with moderately to severely active Crohn's disease that are positive for the risk genotype and/or transcriptomic risk profile.

[1104] Inclusion Criteria: Eligible subjects are men and women 18 years and older. Two groups of subjects are selected: (i) subjects having a risk genotype comprising one or more polymorphisms from Table 2 and/or a transcriptomic risk signature comprising one or more genes from Table 3, and (ii) subjects lacking the risk genotype and the transcriptomic risk signature. Subjects are patients with Crohn's disease or fistulizing Crohn's disease of at least 3 months' duration, with colitis, ileitis, or ileocolitis, confirmed at any time in the past by radiography, histology, and/or endoscopy. Female patient of childbearing potential must have a negative highly sensitive serum (beta-human chorionic gonadotropin [b-hCG]) pregnancy test result at screening and a negative urine pregnancy test result at Week 0. Subjects must adhere to the following requirements for concomitant medication for the treatment of Crohn's disease, which are permitted provided that doses meeting these requirements are stable, or have been discontinued, for at least 3 weeks before baseline (Week 0), unless otherwise specified: a) Oral 5-aminosalicylic acid (5-ASA) compounds, b) Oral corticosteroids at a prednisone-equivalent dose at or below 40 milligram per day (mg/day), or 9 mg/day of budesonide, or 5 mg/day beclomethasone dipropionate, c) Antibiotics being used as a primary treatment of Crohn's disease, d) Conventional immunomodulators (that is, azathioprine (AZA), 6-mercaptopurine (6-MP), or Methotrexate (MTX)): participants must have been taking them for at least 12 weeks and at a stable dose for at least 4 weeks before baseline. Subjects who has or had extensive colitis for greater than or equal to (>=) 8 years, or disease limited to the left side of the colon for >=12 years, must either have had a colonoscopy to assess for the presence of dysplasia within 1 year before the first administration of study agent or a colonoscopy to assess for the presence of malignancy at the screening visit, with no evidence of malignancy. Subjects must have active Crohn's disease, defined as a baseline Crohn's Disease Activity Index (CDAI) score of >=220 but <=450.

[1105] Experimental (Part I): Placebo. Subjects will receive placebo at Weeks 0, 2, 4, 6, 8, and 10. From Week 12 Placebo-treated subjects who are in clinical response at Week 12 (>=100-point reduction from baseline in Crohn's Disease Activity Index (CDAI) or CDAI <150) will continue to receive placebo every 2 weeks from Week 12 through Week 22. Placebo-treated subjects who are not in clinical response at Week 12 will receive test compound (a compound described herein) 400 mg at Week 12 and then test compound every two weeks from Week 14 through Week 22.

[1106] Experimental (Part I): Placebo. Test Compound. Subjects will receive test compound 400 milligram (mg) at Week 0 then 200 mg every two weeks through Week 22.

[1107] Experimental (Part II): Placebo. Placebo at Weeks 0, 2, 4, and 8. From Week 12, placebo-treated subjects who are in clinical response at Week 12 (>=100-point reduction from baseline in CDAI or CDAI <150) will continue to receive placebo at Weeks 12, 14, 16, and 20. Placebo-treated subjects who are not in clinical response at Week 12 will receive test compound 150 mg at Week 12 and then test compound 75 mg at Weeks 14, 16, and 20.

[1108] Experimental (Part II): Test Compound High Dose. Test compound 400 mg at Week 0 and 200 mg at Weeks 2, 4, 8, 12, 16, and 20.

[1109] Experimental (Part II) Test Compound Middle Dose. Test compound 150 mg at Week 0 and 75 mg at Weeks 2, 4, 8, 12, 16, and 20.

[1110] Experimental (Part II) Test compound Low Dose. Test compound 50 mg at Week 0 and 25 mg at Weeks 2, 4, 8, 12, 16, and 20.

[1111] Primary Outcome Measures: Part I: Change From Baseline in the Crohn's Disease Activity Index (CDAI) Score at Week 8 [Time Frame: Baseline through Week 8]—CDAI will be assessed by collecting information on 8 different Crohn's disease-related variables: extra-intestinal manifestations, abdominal mass, weight, hematocrit, total number of liquid stools, abdominal pain/cramping, use of antidiarrheal drug(s) and/or opiates, and general well-being. The last 4 variables are scored over 7 days by the participant on a diary card Part II: Change From Baseline in the Crohn's Disease Activity Index (CDAI) Score at Week 8 [Time Frame: Baseline through Week 8]—CDAI are assessed by collecting information on 8 different Crohn's disease-related variables: extra-intestinal manifestations, abdominal mass, weight, hematocrit, total number of liquid stools, abdominal pain/cramping, use of antidiarrheal drug(s) and/or opiates, and general well-being. The last 4 variables are scored over 7 days by the participant on a diary card.

[1112] Secondary Outcome Measures: Part II: Clinical Remission at Week 8 as Measured by Crohn's Disease Activity Index (CDAI <150) [Time Frame: Week 8]. Part II: Clinical Response at Week 8 as Measured by CDAI (>=100-point reduction from baseline in CDAI or CDAI <150) [Time Frame: Week 8]. Part II: Change in Patient-Reported Outcome (PRO)-2 from baseline at Week 8 [Time Frame: Baseline through Week 8]—The PRO-2 score is the sum of the abdominal pain and stool frequency subscores of the CDAI score. Part II: Clinical remission at Week 8 as measured by PRO-2 (PRO-2<75) [Time Frame: Week 8]. Part II: Clinical response at Week 8 as measured by PRO-2 (>=50-point reduction from baseline in PRO-2 or PRO-2<75) [Time Frame: Week 8]. Part II: Change in Simple Endoscopic Score for Crohn's Disease (SES-CD) from baseline at Week 12 [Time Frame: Baseline through Week 12]—The SES-CD score is based on the evaluation of 4 endoscopic components (presence/size of ulcers, proportion of mucosal surface covered by ulcers, proportion of mucosal surface affected by any other lesions, and presence/type of narrowing/strictures) across 5 ileocolonic segments. Each endoscopic component is scored from 0 to 3 for each segment, and a total score is derived from the sum of all the component scores (range, 0 to 56).

### Example 10

### Calculating a Polygenic Risk Score (PRS)

[1113] Genetic patient selection criteria for treatment with an ADCY7 agonist or inhibitor of PDE4 is determined by calculating a polygenic risk score (PRS) for all patients within the Precision IBD database (n˜12,000), based on a defined set of polymorphisms (SNPs) within the genes representing the CD3 risk signature. The PRS is based on polymorphisms within the multiple genes associated with the CD3 risk signature (n=174 genes) and their associated weights (e.g., the strength of their association with disease phenotype). Thus, PRS is calculated as a normalized weighted sum of the number of risk alleles carried by each individual (0, 1, or 2) at each CD3 risk loci, with weights proportional to the odds ratio of disease association. The PRS is binomially distributed within the population and gives an individual risk assessment for variants within this signature.

### Defining the SNPs to Calculate the PRS

[1114] The defined set of SNPs is either selected from Table 2 or Table 14. Table 2 represents the CD3 associated independent signals among 266 unique SNPs belonging to the 174 genes comprising the transcriptomic risk signature. Conditional analysis is performed to determine independent signals. The weights (odds ratio) for building the PRS in Cedars cohort is obtained by genetic associations of Table 2 SNPs using the international (IIBDGC) case-control cohort. Association of PRS with CD3 associated phenotypes are done in Cedars cohort to assess utility of a genetic kit with Table 2 SNPs in identifying CD3 patients. Alternatively, only specific SNPs are selected from Table 2 that are located at gene loci of 17 genes listed in Table 14 that have been determined to drive specific gene pathways (e.g., cAMP, or RhoGDI) based on the overlap observed of genetics and expression between CD1 and CD3 subgroups. The weights (odds ratio) for building the PRS in Cedars cohort are obtained by genetic associations of SNPs at gene loci listed in Table 14 using the international (IIBDGC) case-control cohort. Association of PRS with CD3 associated phenotypes is done to assess utility of a genetic kit with SNPs within genes listed in Table 14 in identifying CD3 patients.

TABLE 14
17 genes determined to drive specific gene pathways

| | | | |
|---|---|---|---|
| PTPN11 | RPL30 | XCR1 | HNF1A |
| RPL3 | CHRM3 | DLC1 | APOB |
| RPL6 | GRM4 | PAK2 | |
| RPL18 | PDE4C | PRKCA | |
| PPP2CA | PIP5K1C | HIST1H1A | |

### Example 11

### Transcriptional Risk Signature (TRSig) for Enriching a Population of Severe Crohn's Disease Subjects

[1115] In a population of refractory CD patients that underwent SB resection, CD3 is identified as a more severe refractory, distinct clinical sub-group (FIG. 6). The genetic and transcriptomic analyses described herein identify genetic burden, gene expression signature and mechanistic pathways that could potentially underlie the pathogenesis of this severe patient sub-group. Pathways and genetic signatures described herein might reflect an abnormality in wound healing as indicated by the differential regulation of signatures for epithelial to mesenchymal transition (EMT) and the WNT/B-catenin pathway. Signatures for infiltrating cell types implicated in intestinal remodeling were also identified, and described herein. Lastly, potential pathways identified in the work described herein may provide clues as to the most appropriate therapeutic options for these patients that are faced with a poor quality of life and recurring, severe disease.

[1116] A number of genes were identified that may be used in a transcriptional risk signature (TRSig) to identify Crohn's disease (CD) patients at risk for progressing to a severe form of the disease characterized by the CD3 phenotype. Table 14 provides a narrowed list 17 of genes determined to drive specific gene pathways (e.g., cAMP, or RhoGDI) with a polymorphism (see Table 2) associated with the up or down regulation of that gene in CD3 patients. In addition to the 17 genes identified, 8 polymorphisms from Table 2 that were also cis eQTL in the small bowel expression data (p<0.01) were identified Lastly, the 1 gene that were used in the TRS calculation from Example 6 and the TRSig associated with CD3 were identified. Thus, a total of 26 genes were identified that are powerful indicators of the CD3 subtype.

[1117] The 26 genes making up the final TRSig provided herein are protein tyrosine phosphatase, non-receptor type 11 (PTPN11), ribosomal protein (RL30), X-C motif chemokine receptor 1 (XCR1), HNF1 homeobox A (HNF1A), ribosomal protein L3 (RPL3), cholinergic receptor muscarinic 3 (CHRM3), DLC1 Rho GTPase activating protein (DLC1), apolipoprotein B (APOB), ribosomal protein L6 (RPL6), glutamate metabotropic receptor 4 (GRM4), p21 (RAC1) activated kinase 2 (PAK2), ribosomal protein L18 (RPL18), phosphodiesterase 4C (PDE4C), protein kinase C alpha (PRKCA), protein phosphatase 2 catalytic subunit alpha (PPP2CA), phosphatidylinositol-4-phosphate 5-kinase type 1 gamma (PIP5K1C), histone cluster 1 H1 family member A (HIST1H1A), Aldehyde Dehydrogenase 2 Family Member (ALDH2), bromodomain containing 2 (BRD2), major histocompatibility complex, class II, DQ alpha 2 (HLA-DQA2), kinesin family member 21B (KIF21B), Protocadherin 7 (PCDH7), Ankyrin 3 (ANK3), Tripartite Motif Containing 38 (TRIM38), Cytochrome P450 Family 4 Subfamily V Member 2 (CYP4V2), Vesicle Associated Membrane Protein 3 (VAMP3). Each gene is a predictor of the CD3 phenotype, either alone or in combination.

### Example 12

### Treating an Inflammatory Disease

[1118] An inflammatory disease (e.g, Crohn's disease) is treated in a subject, by first, determining the genotype and/or transcriptomic signature of the subject. Optionally, the subject is, or is susceptible to be, non-responsive to certain therapies such as anti-TNF, steroids, or immunomodulators, such as those disclosed herein. A sample of whole blood is obtained from the subject. An assay is performed on the sample obtained from the subject to detect a presence of a risk genotype comprising one or more polymorphisms from Table 2, by Illumina ImmunoArray or polymerase chain reaction (PCR) under standard hybridization conditions. In addition, or alternatively, a sample of intestinal tissue is obtained from the subject. As assay is performed on the sample obtained from the subject to detect a presence of a transcriptomic risk signature comprising one or more genes from Table 3 or Table 4, by Illumina ImmunoArray or polymerase chain reaction (PCR) under standard hybridization conditions.

[1119] The subject is determined to be at risk for developing a severe form of inflammatory disease if the risk genotype and/or the transcriptomic risk signature is detected in the sample obtained from the subject. A therapeutically effective amount of an ADCY7 agonist and/or an inhibitor of PDE4 is administered to the subject, provided the subject is determined to have the risk genotype and/or the transcriptomic risk signature.

[1120] While embodiments of the present invention have been shown and described herein, it will be obvious to those skilled in the art that such embodiments are provided by way of example only. Numerous variations, changes, and substitutions will now occur to those skilled in the art without departing from the invention. It should be understood that various alternatives to the embodiments of the invention described herein may be employed in practicing the invention.

1. A method of treating an inflammatory bowel disease, the method comprising:
a) identifying a presence of a transcriptomic risk signature predictive of a severe or refractory form of inflammatory bowel disease (IBD) in a subject by assaying a sample obtained from the subject to detect a presence of a risk genotype comprising a single nucleotide polymorphism (SNP) selected from the group consisting of an “A” at rs7958372, a “C” at rs2877453, an “A” at rs71327010, a “C” at rs1169302C, a “G” at rs1169303, an “A” at rs6519183, a “C” at rs685548, an “A” at rs11998187, an “A” at rs531819A, a “G” at rs1041968, a “G” at rs693, an “A” at rs512535, a “G” at rs550619G, an “A” at rs570877, a “G” at rs12713956, an “A” at rs2301723, an “A” at rs2499714, an “A” at rs6583176, an “A” at rs369880, a “G” at rs57884093, an “A” at rs989690, an “A” at rs7704116, an “A” at rs12984273, a “G” at rs16891235, a “C” at rs7296651, an “A” at is rs516535, an “A” at rs9276427, an “A” at rs296564, an “A” at rs296569, an “A” at rs296568, a “G” at rs296567, a “G” at rs296561, a “G” at rs72749142, an “A” at rs9291547, an “A” at rs10761532, an “A” at rs10821813, a “C” at rs1561852, an “A” at rs10994464, a “G” at rs993402, an “A” at rs10994467, an “A” at rs10821822, a “G” at rs1837949, a “C” at rs35597961, a “G” at rs10821830, an “A” at rs975262, an “A” at rs973067, a “G” at rs10509139, an “A” at rs1442539, an “A” at rs2197155, a “G” at rs7919914, a “G” at rs10994476, an “A” at rs35471473, a “G” at rs12785023, a “G” at rs12783716, a “G” at rs10821821, a “G” at rs10994441, a “C” at rs10994442, a “T” at rs10821814, an “A” at rs10994465, a “T” at rs12218617, a “C” at rs10509138, an “A” at rs61854518, a “G” at rs10821699, a “G” at rs7919274, an “A” at rs10761552, a “G” at rs17037425, an “A” at rs2893861, a “C” at rs1993939, a “G” at rs10821833, a “G” at rs1904418, a “G” rs16915196, an “A” at rs61853514, an “A” at rs10994430, an “A” at rs16915231, a “G” at rs2028564, a “G” at rs13196552, an “A” at rs17587597, an “A” at rs17587226, an “A” at rs2276917, an “A” at rs10013653, an “A” at rs11582799, an “A” at rs111692854, and an “A” at rs72632053; and
b) administering to the subject a therapeutically effective amount of a therapeutic agent, the therapeutic agent comprising at least one of an inhibitor of phosphodiesterase 4C (PDE4C) activity or expression inhibitor and an agonist of adenylate cyclase 7 (ADCY7), provided the transcriptomic risk signature is detected in (a).

2. The method of claim 1, wherein the IBD is Crohn's disease (CD).

3. The method of claim 2, wherein the CD is ileal CD.

4. (canceled)

5. (canceled)

6. The method of claim 1, further comprising assaying a sample obtained from the subject to detect the transcriptomic risk signature, the transcriptomic risk signature comprising:
a) a high level of expression of at least one of X-C motif chemokine receptor 1 (XCR1), HNF1 homeobox A (HNF1A), metabotropic receptor 4 (GRM4), cholinergic receptor muscarinic 3 (CHRM3), phosphodiesterase 4C (PDE4C), protein kinase C alpha (PRKCA), phosphatidylinositol-4-phosphate 5-kinase type 1 gamma (PIP5K1C), histone cluster 1 H1 family member A (HIST1H1A), and kinesin family member 21B (KIF21B), as compared to a reference level; and
a) a low level of expression of at least one of ribosomal protein L3 (RPL3), protein tyrosine phosphatase, non-receptor type 11 (PTPN11), ribosomal protein L30 (RPL30), DLC1 Rho GTPase activating protein (DLC1), apolipoprotein B (APOB), ribosomal protein L6 (RPL6), p21 (RAC1) activated kinase 2 (PAK2), ribosomal protein L18 (RPL18), protein phosphatase 2 catalytic subunit alpha (PPP2CA), Aldehyde Dehydrogenase 2 Family Member (ALDH2), bromodomain containing 2 (BRD2), major histocompatibility complex, class II, DQ alpha 2 (HLA-DQA2), Protocadherin 7 (PCDH7), Ankyrin 3 (ANK3), Tripartite Motif Containing 38 (TRIM38), and Cytochrome P450 Family 4 Subfamily V Member 2 (CYP4V2), Vesicle Associated Membrane Protein 3 (VAMP3), as compared to a reference level.

7. The method of claim 6, wherein the reference value is derived from a level of expression in a non-diseased individual.

8. The method of claim 1, wherein the presence of the risk genotype is indicative of a presence of the transcriptomic risk signature, the transcriptomic risk signature comprising:
a) a high level of expression of at least one of XCR1, HNF1A, GRM4, CHRM3, PDE4C, PRKCA, PIP5K1C, HIST1H1A, and KIF21B, as compared to a reference level; and
b) a low level of expression of at least one of RPL3, PTPN11, RPL30, DLC1, APOB, RPL6, PAK2, RPL18, PPP2CA, ALDH2, BRD2, HLA-DQA2, PCDH7, ANK3, TRIM38, CYP4V2, and VAMP3, as compared to a reference level.

9. A method of treating a Crohn's disease (CD) in a subject comprising administering a therapeutically effective amount of at least one of an inhibitor of phosphodiesterase 4C (PDE4C) activity or expression inhibitor and an agonist of adenylate cyclase 7 (ADCY7) to the subject, provided a risk genotype comprising a single nucleotide polymorphism (SNP) selected from the group consisting of an “A” at rs7958372, a “C” at rs2877453, an “A” at rs71327010, a “C” at rs1169302C, a “G” at rs1169303, an “A” at rs6519183, a “C” at rs685548, an “A” at rs11998187, an “A” at rs531819A, a “G” at rs1041968, a “G” at rs693, an “A” at rs512535, a “G” at rs550619G, an “A” at rs570877, a “G” at rs12713956, an “A” at rs2301723, an “A” at rs2499714, an “A” at rs6583176, an “A” at rs369880, a “G” at rs57884093, an “A” at rs989690, an “A” at rs7704116, an “A” at rs12984273, a “G” at rs16891235, a “C” at rs7296651, an “A” at is rs516535, an “A” at rs9276427, an “A” at rs296564, an “A” at rs296569, an “A” at rs296568, a “G” at rs296567, a “G” at rs296561, a “G” at rs72749142, an “A” at rs9291547, an “A” at rs10761532, an “A” at rs10821813, a “C” at rs1561852, an “A” at rs10994464, a “G” at rs993402, an “A” at rs10994467, an “A” at rs10821822, a “G” at rs1837949, a “C” at rs35597961, a “G” at rs10821830, an “A” at rs975262, an “A” at rs973067, a “G” at rs10509139, an “A” at rs1442539, an “A” at rs2197155, a “G” at rs7919914, a “G” at rs10994476, an “A” at rs35471473, a “G” at rs12785023, a “G” at rs12783716, a “G” at rs10821821, a “G” at rs10994441, a “C” at rs10994442, a “T” at rs10821814, an “A” at rs10994465, a “T” at rs12218617, a “C” at rs10509138, an “A” at rs61854518, a “G” at rs10821699, a “G” at rs7919274, an “A” at rs10761552, a “G” at rs17037425, an “A” at rs2893861, a “C” at rs1993939, a “G” at rs10821833, a “G” at rs1904418, a “G” rs16915196, an “A” at rs61853514, an “A” at rs10994430, an “A” at rs16915231, a “G” at rs2028564, a “G” at rs13196552, an “A” at rs17587597, an “A” at rs17587226, an “A” at rs2276917, an “A” at rs10013653, an “A” at rs11582799, an “A” at rs111692854, and an “A” at rs72632053, is detected in a sample obtained from the subject.

10. The method of claim 9, wherein the risk genotype further comprises at least two SNPs selected from the group consisting of the “A” at rs7958372, the “C” at rs2877453, the “A” at rs71327010, the “C” at rs1169302C, the “G” at rs1169303, the “A” at rs6519183, the “C” at rs685548, the “A” at rs11998187, the “A” at rs531819A, the “G” at rs1041968, the “G” at rs693, the “A” at rs512535, the “G” at rs550619G, the “A” at rs570877, the “G” at rs12713956, the “A” at rs2301723, the “A” at rs2499714, the “A” at rs6583176, the “A” at rs369880, the “G” at rs57884093, the “A” at rs989690, the “A” at rs7704116, the “A” at rs12984273, and the “G” at rs16891235, the “C” at rs7296651, the “A” at is rs516535, the “A” at rs9276427, the “A” at rs296564, the “A” at rs296569, the “A” at rs296568, the “G” at rs296567, the “G” at rs296561, the “G” at rs72749142, the “A” at rs9291547, the “A” at rs10761532, the “A” at rs10821813, the “C” at rs1561852, the “A” at rs10994464, the “G” at rs993402, the “A” at rs10994467, the “A” at rs10821822, the “G” at rs1837949, the “C” at rs35597961, the “G” at rs10821830, the “A” at rs975262, the “A” at rs973067, the “G” at rs10509139, the “A” at rs1442539, the “A” at rs2197155, the “G” at rs7919914, the “G” at rs10994476, the “A” at rs35471473, the “G” at rs12785023, the “G” at rs12783716, the “G” at rs10821821, the “G” at rs10994441, the “C” at rs10994442, the “T” at rs10821814, the “A” at rs10994465, the “T” at rs12218617, the “C” at rs10509138, the “A” at rs61854518, the “G” at rs10821699, the “G” at rs7919274, the “A” at rs10761552, the “G” at rs17037425, the “A” at rs2893861, the “C” at rs1993939, the “G” at rs10821833, the “G” at rs1904418, the “G” rs16915196, the “A” at rs61853514, the “A” at rs10994430, the “A” at rs16915231, the “G” at rs2028564, the “G” at rs13196552, the “A” at rs17587597, the “A” at rs17587226, the “A” at rs2276917, the “A” at rs10013653, the “A” at rs11582799, the “A” at rs111692854, and the “A” at rs72632053.

11. The method of claim 9, wherein the CD is ileal CD.

12. The method of claim 9, wherein the CD is refractory CD.

13. The method of claim 9, wherein the CD is perianal CD.

14. The method of claim 9, wherein the subject is, or is suspected to be, non-responsive to a standard therapy selected from the group consisting of anti-tumor necrosis factor (TNF) alpha therapy, anti-a4-b7 therapy, anti-IL12p40 therapy, Thalidomide, Cytoxan, and a combination thereof.

15. A method of characterizing an inflammatory bowel disease, the method comprising:
a) obtaining a sample comprising genetic material from a subject having an inflammatory bowel disease;
b) providing a nucleic acid molecule comprising a detectable moiety, the nucleic acid molecule comprising a nucleic acid sequence that is capable of hybridizing to a risk genotype comprising a single nucleotide polymorphism (SNP) selected from the group consisting of an “A” at rs7958372, a “C” at rs2877453, an “A” at rs71327010, a “C” at rs1169302C, a “G” at rs1169303, an “A” at rs6519183, a “C” at rs685548, an “A” at rs11998187, an “A” at rs531819A, a “G” at rs1041968, a “G” at rs693, an “A” at rs512535, a “G” at rs550619G, an “A” at rs570877, a “G” at rs12713956, an “A” at rs2301723, an “A” at rs2499714, an “A” at rs6583176, an “A” at rs369880, a “G” at rs57884093, an “A” at rs989690, an “A” at rs7704116, an “A” at rs12984273, a “G” at rs16891235, a “C” at rs7296651, an “A” at is rs516535, an “A” at rs9276427, an “A” at rs296564, an “A” at rs296569, an “A” at rs296568, a “G” at rs296567, a “G” at rs296561, a “G” at rs72749142, an “A” at rs9291547, an “A” at rs10761532, an “A” at rs10821813, a “C” at rs1561852, an “A” at rs10994464, a “G” at rs993402, an “A” at rs10994467, an “A” at rs10821822, a “G” at rs1837949, a “C” at rs35597961, a “G” at rs10821830, an “A” at rs975262, an “A” at rs973067, a “G” at rs10509139, an “A” at rs1442539, an “A” at rs2197155, a “G” at rs7919914, a “G” at rs10994476, an “A” at rs35471473, a “G” at rs12785023, a “G” at rs12783716, a “G” at rs10821821, a “G” at rs10994441, a “C” at rs10994442, a “T” at rs10821814, an “A” at rs10994465, a “T” at rs12218617, a “C” at rs10509138, an “A” at rs61854518, a “G” at rs10821699, a “G” at rs7919274, an “A” at rs10761552, a “G” at rs17037425, an “A” at rs2893861, a “C” at rs1993939, a “G” at rs10821833, a “G” at rs1904418, a “G” rs16915196, an “A” at rs61853514, an “A” at rs10994430, an “A” at rs16915231, a “G” at rs2028564, a “G” at rs13196552, an “A” at rs17587597, an “A” at rs17587226, an “A” at rs2276917, an “A” at rs10013653, an “A” at rs11582799, an “A” at rs111692854, and an “A” at rs72632053;
c) contacting the nucleic acid molecule to the sample obtained from the subject;
d) detecting a hybridization complex between the nucleic acid molecule and the risk genotype;
e) characterizing the inflammatory bowel disease as a severe form of Crohn's disease (CD).

16. (canceled)

17. (canceled)

18. (canceled)

19. The method of claim 15, wherein the detectable moiety is a fluorophore, and wherein the nucleic acid molecule optionally comprises a quencher molecule.

20. The method of claim 15, further comprising selecting the subject for treatment with a therapeutic agent comprising at least one of an inhibitor of phosphodiesterase 4C (PDE4C) activity or expression inhibitor and an agonist of adenylate cyclase 7 (ADCY7).

21. The method of claim 14, wherein the anti-a4-b7 therapy is vedolizumab.

22. The method of claim 14, wherein the anti-IL12p40 therapy is ustekinumab.

The application's sequence listing, which the Patent Office published only in electronic form, follows.

SEQUENCE LISTING (11154 sequences)

SEQ ID NO: 1 - DNA, 121 bp, Homo sapiens
  source 1..121: mol_type = other DNA
tcctggattcaatgtcatccagagcccagagcaggtacggggcgccacggatcagtcattratccaggttgatgatggagaccctggccagaatcactaaaagatcactggtggatcatta

SEQ ID NO: 2 - DNA, 121 bp, Homo sapiens
  source 1..121: mol_type = other DNA
ccggtgtctctgcctccatcagacgtcagtctggagattgtgccgtgaatccactgttgcrgaggacagcagcctctggatctcatgggacatcctgacccgagctcccaacctgagtatt

SEQ ID NO: 3 - DNA, 121 bp, Homo sapiens
  source 1..121: mol_type = other DNA
agagtaaaagaatatactgacattacttcatggtttagaacaaacaccttgagaataaaamgtcatgtttaacatgacttgcactgaactagatacacaccatatttatggctttatgtca

SEQ ID NO: 4 - DNA, 121 bp, Homo sapiens
  source 1..121: mol_type = other DNA
gtggacaaaagacaaacgcgcctgttggctcattgttcttccccagccctggcatcggacrgcacttgcctttacggtttcattacaacgggcagatttagaaatacaaggaaattggccc

SEQ ID NO: 5 - DNA, 121 bp, Homo sapiens
  source 1..121: mol_type = other DNA
cacttactagttcaatccatccccaaatccacgccaccctttcaactttgcaattaagagrgagaaggagaaatcccggtcaactcgccttggggggttggtctgagggtagaggactcaa

SEQ ID NO: 6 - DNA, 121 bp, Homo sapiens
  source 1..121: mol_type = other DNA
aaggccaaacgtgccccatgggaaagggtcgacatggcagtgctggcccgggggctgtccrggcagtgtggggacaggccctgcgagagcttcaggcatcagaggcccttgcacaggcaaa

SEQ ID NO: 7 - DNA, 121 bp, Homo sapiens
  source 1..121: mol_type = other DNA
tggtctcctttgagcctaccatagcatttggatttaccatcattatgtttacttatgtgcrttgagaaacttatgtgatataaggtttgctttaaactatgaggtcttaaatatttcccat

SEQ ID NO: 8 - DNA, 121 bp, Homo sapiens
  source 1..121: mol_type = other DNA
tcccaaaacactgggattacggatgagtcaccatgcctgccataaaagagtaagttttctrtcccagattagataggaaaagaagaaataggttgtataaaatgtcagtcaagacaaaaaa

SEQ ID NO: 9 - DNA, 121 bp, Homo sapiens
  source 1..121: mol_type = other DNA
taatttgtctagaaaaatacttgaaagatggttttgcaggagttaccttccaggtcaggarctggtaaaccaaagcccatgggtgcctgcactctgcttctggtgacctgcaagctaagag

SEQ ID NO: 10 - DNA, 121 bp, Homo sapiens
  source 1..121: mol_type = other DNA
tttacaactaagatttgggattttgtatattcattgagaggcacagttagtacagatatcrcaaggtaaagtttctgtttattgatgttcgctgtctggggaaaaccgacaataatcagtt

SEQ ID NO: 11 - DNA, 121 bp, Homo sapiens
  source 1..121: mol_type = other DNA
atacatgtctttgggtgaacgtgtgtgtccatttctgctgggtgcgcacctgggactggcrctacgtgtcagagggtgtgcctctggattcagctctgatgtacctgcttactcccaacct

SEQ ID NO: 12 - DNA, 121 bp, Homo sapiens
  source 1..121: mol_type = other DNA
tgttgctaggaaacggtgcatggccaggaggagctgtggtgatattttaaccttcatctcrctgtctgtctgcttaaaggcagaaaaatcttgctttcgttcccggtgagccactttcttt

SEQ ID NO: 13 - DNA, 121 bp, Homo sapiens
  source 1..121: mol_type = other DNA
gcccagccacagttggtttttaaacagtcatttgtgaggaaggatgaaaagaacgtaaacrtacaaataatattctctgagacctctgacgaccctccaagtgaggaaaggataaaacaga

SEQ ID NO: 14 - DNA, 121 bp, Homo sapiens
  source 1..121: mol_type = other DNA
agaaacaagatctagccccatctagattcccacgcccccaagccccccgcttcccccaagrctagaatcagctattctccatggagccagttgcttttgtggtagaatagtattaggtact

SEQ ID NO: 15 - DNA, 121 bp, Homo sapiens
  source 1..121: mol_type = other DNA
ggctctcccagtagcaaggcatccccgagagactgtgtgtggagaagcagacgtgagcccrgataggttgacagggcagagttcctgaggccagagaagctgggctaggcaggcttggctc

SEQ ID NO: 16 - DNA, 121 bp, Homo sapiens
  source 1..121: mol_type = other DNA
caaggagcaaaacagacaatttgccagggaagttgacaactaactgccaggtccagccacrctgcactcacgtctctcaccttaacaaactgcagatccgaaagggctcgcaccgagtaat

SEQ ID NO: 17 - DNA, 121 bp, Homo sapiens
  source 1..121: mol_type = other DNA
ttcatatcaactgatttgttgtaaatttagagaaagcaaattaccctagaaactccagaargaattcctacttagtaacataaatcaaccgcagctctcatatattgcaggtgggaatgca

SEQ ID NO: 18 - DNA, 121 bp, Homo sapiens
  source 1..121: mol_type = other DNA
ttattacttcttctacctcatgagatctatagcagtaagggaagcctccatgaaagtggtragattagcctaatgccagactggctccctggctcaaggaaggggatccctaaaaaataat

SEQ ID NO: 19 - DNA, 121 bp, Homo sapiens
  source 1..121: mol_type = other DNA
gtatgacttcggggttcagagctaccttcaccgctacactgacagtctagctgagaaaaartccaacccagaagaaaagagaaccaaataataattctaatgaccaacacttgagaacaga

SEQ ID NO: 20 - DNA, 121 bp, Homo sapiens
  source 1..121: mol_type = other DNA
ataactgtagcagaaccccaagacgtaagggagggggagttcctgaaagggtgggatgccraggaatcaatactacaggaaatgatctcttttaaaacatttaatctctcttacttggagg

SEQ ID NO: 21 - DNA, 121 bp, Homo sapiens
  source 1..121: mol_type = other DNA
tttaatcattatatgccatggattttcagggcattttaagcctttataatggtgtaacttrtgattaagatttacacagtcaaaattgttagctggtataatagctgaatagttaagtatt

SEQ ID NO: 22 - DNA, 121 bp, Homo sapiens
  source 1..121: mol_type = other DNA
taaaagactaaaattggcagcatgcatacaaaaaagatgaacaaactataggctgtctacmagaacttggtccaaattcaacattaagtaagctaaaagtaaaaggataaaaaaaattata

SEQ ID NO: 23 - DNA, 121 bp, Homo sapiens
  source 1..121: mol_type = other DNA
ttcacttaaatgtgcggaacgaaactaaaattttcaatataagggcatttgtttatgaccrtaggatagggaagggttgtttttaaatttttgttattttttttttaaataattgggtctt

SEQ ID NO: 24 - DNA, 121 bp, Homo sapiens
  source 1..121: mol_type = other DNA
tctagtttaccatttaactaatgttgacaagtgtcttaatcgctataaatctctgtttccmccctttaaaaaatgtggttgttatcattatttactttagaggattattgtgagaattaaa

SEQ ID NO: 25 - DNA, 121 bp, Homo sapiens
  source 1..121: mol_type = other DNA
tggcttagcaaaaaaacttttaaatggcttcacataataaaaagtttggagatagtcttcratgacttaagtttctttctttctttctcatagtcttaggatatctgtgaagttgcaggtg

SEQ ID NO: 26 - DNA, 121 bp, Homo sapiens
  source 1..121: mol_type = other DNA
gattatgttagcttgaagaatggactgataaactttctataaggcttattacaggctttarcctgtaaaattgatctcatcgtaaacagctttgagagtatacagatagttgactattttt

SEQ ID NO: 27 - DNA, 121 bp, Homo sapiens
  source 1..121: mol_type = other DNA
ttctttgggcttcatggatttggatgttcatttttttcttccagatttggggtggttttcrtcattatttctttaaataaactttatgccccttctctttctcttttatttctgtaataca

SEQ ID NO: 28 - DNA, 121 bp, Homo sapiens
  source 1..121: mol_type = other DNA
agcctggggccatgagagctgangtggcagtggaatggccctggaatctgggtccacaggrgttgacctggatgttagctctgtaggagtggacctggagcctggggctatagacattgac

SEQ ID NO: 29 - DNA, 121 bp, Homo sapiens
  source 1..121: mol_type = other DNA
gggtatagataagacaagattggccatgagtttatagttgtcgaagttggtgaaaggaacrtggaggctcgttatactattcttcctgccttttatatgcttaacattttttacaataaat

SEQ ID NO: 30 - DNA, 121 bp, Homo sapiens
  source 1..121: mol_type = other DNA
gattgggatcaaaatataaatatttaattttacacaacctacttagaatcaatattttatmacttcaagggggatatagaaatgttataatcatttagatcctattaccttccctctttat

SEQ ID NO: 31 - DNA, 121 bp, Homo sapiens
  source 1..121: mol_type = other DNA
ctgcaacaaagaccatctccccaaacacctcctgcaacgccaccacagccagcgcctttamcttaagcaccaggtatgttcacagtacaaccactggcataggataccatcatactaaaca

SEQ ID NO: 32 - DNA, 121 bp, Homo sapiens
  source 1..121: mol_type = other DNA
cacatgattcaaagcaccaaatatctgtttggtcttttcaataattcttcctgggtagctrtcccttctgctaataacttcatctttcatcaagactaaaaataaacttttgagatatcgc

SEQ ID NO: 33 - DNA, 121 bp, Homo sapiens
  source 1..121: mol_type = other DNA
ggggacccaggacctaggtgtcctaggtccaagtcctgctggcacagaaaagggaggcggrgccccagtttagggtgggtctgtgattcctctgtggcaacccaggccggacaaggaacca

SEQ ID NO: 34 - DNA, 121 bp, Homo sapiens
  source 1..121: mol_type = other DNA
aatggggctctgggaggggtgcaaactgaaagtgaaacagctgacatccaggaaacactcrccctgatgaggggtcacagcaggttggggctgcggtcaggaccaggcaaagaggaaaatt

SEQ ID NO: 35 - DNA, 121 bp, Homo sapiens
  source 1..121: mol_type = other DNA
ctcactggccaaactcattggccatttttcttctgtacaaggttcttaactgggaggtgtratgtcagtaggcaaacctacttcaaagctgcagacgacagtaacttgagagtggaatagn

SEQ ID NO: 36 - DNA, 121 bp, Homo sapiens
  source 1..121: mol_type = other DNA
aaagcagaacattaccaggacctcaaaaaccttcttgtgtgtctctgatgataaacctctscctccctccatcctcaaaagtgactaccatcttgacatctgtgatgatttcctttccttt

SEQ ID NO: 37 - DNA, 121 bp, Homo sapiens
  source 1..121: mol_type = other DNA
cctctgtacttgccattgttttaatttgtattttctggttcctgatgagcgtgggcatttmtaaatacactcagccatttgggcttccttttctgggaatcacctgttttcctctttctca

SEQ ID NO: 38 - DNA, 121 bp, Homo sapiens
  source 1..121: mol_type = other DNA
acattatggaagattgccgttgtattactggttatctttttgctgctggctctcataaatrtcgtgagggctcctggagggcaggagctgtgtctcctgcttctttgacagccatccccat

SEQ ID NO: 39 - DNA, 121 bp, Homo sapiens
  source 1..121: mol_type = other DNA
atggaaccaccattgtatatatggtctgtctttcaccaaaacgttacgtggggcctgacartaattgcaaatgaagaaccatttggccgaggtgctgctgcatctgcttaaatgaatcaac

SEQ ID NO: 40 - DNA, 121 bp, Homo sapiens
  source 1..121: mol_type = other DNA
acagagagaaagcaagaaatagaggatcctgctttgctgcagtgttttaaagatgtgtgamtgcaaaggcgtttcccattttagacatttcacatctgcccctgggcctgcgaaagaccca

SEQ ID NO: 41 - DNA, 121 bp, Homo sapiens
  source 1..121: mol_type = other DNA
aaaatctaaaggatgaatactttgaggaaatcatggaagaatatgaagatattagacaggrccattatgagtctctcaaggtaagtggtagaaacagatttttgcttgtttttaatgtgac

SEQ ID NO: 42 - DNA, 121 bp, Homo sapiens
  source 1..121: mol_type = other DNA
caagcgtttatttagcactatgctagntattttggaggatacagagacacacaaaacatartttctgacttcacacatgcttaagatccagtgagggaagcagacacgtacccactgttct

SEQ ID NO: 43 - DNA, 121 bp, Homo sapiens
  source 1..121: mol_type = other DNA
taccaactaaataatgcatttttaagcaacatagcttagttttgccacttttgcaacctcrtatgaatggaatcacataacatgcattctcttctgtccacaccaatacttgtcatgaggc

SEQ ID NO: 44 - DNA, 121 bp, Homo sapiens
  source 1..121: mol_type = other DNA
ggctgagtgaacggtggcccggatgggaagccaggctgccgggcccaggtctacgctgtgrttcggccatgggctctcaggcctggtgtcactgatgtgctcaattttagagctctgatcc

SEQ ID NO: 45 - DNA, 121 bp, Homo sapiens
  source 1..121: mol_type = other DNA
gtattttgatgattttataaatcagtcctatctcccctcaaccatagggtgggtatgagtmcaaagaagaggggcagctcaatgtagtctgtgcatttgtgagttaggagataagatttgg

SEQ ID NO: 46 - DNA, 121 bp, Homo sapiens
  source 1..121: mol_type = other DNA
gctagtcagagaagcccagggcttctggtctgaaacagactagggagcggggaagaattcrtgtgaatgcaggacgtgggtgagtctggaaatatttcactgttcagtggagtacttttaa

SEQ ID NO: 47 - DNA, 121 bp, Homo sapiens
  source 1..121: mol_type = other DNA
aggttttcctgaagaattgaaatttaagctgatacccaatagaaaatagagaagagctggrtgaacttgagcaggggagggtgaggtaagcaaaaaagtggaatgaaacttgttgcaaggg

SEQ ID NO: 48 - DNA, 121 bp, Homo sapiens
  source 1..121: mol_type = other DNA
cagtgaccggctcctggagcagggctgcctccctgcccctgcccgcccccgccccactgcrctgcaccaccctgggcaacaccatttactgcctcaacccccaggtcactgccaccttcac

SEQ ID NO: 49 - DNA, 121 bp, Homo sapiens
  source 1..121: mol_type = other DNA
tacaaatctgtctctgtaatttccacccacaaattctaattctatccctttggactgcacrgtatcatcacaaagatccttctaagagggtagtangagggtcaaagtgagagaaggagat

SEQ ID NO: 50 - DNA, 121 bp, Homo sapiens
  source 1..121: mol_type = other DNA
taacaccttcatagactccactctgataaaataagaagaaaaaaagaaatgtatttattcmctttttttccccttacttctatattatatgttaaaatcctaccctgtggtttgcatttgt

SEQ ID NO: 51 - DNA, 121 bp, Homo sapiens
  source 1..121: mol_type = other DNA
agactaaaattctgcaatgaagcagctttcggatcaaaactccaaaaataaatgaatgccmaatgacttcactgaaccttaatcctaaacagaagaccttatggctactacataccttgac

SEQ ID NO: 52 - DNA, 121 bp, Homo sapiens
  source 1..121: mol_type = other DNA
gggaagggtggcatatggggaggaagggatcattgagaatacagggtgaaaaagaacgacrttactgaaggtagacattgctagtgcaaggtacggaatccatgtgcaaaaggtggctgga

SEQ ID NO: 53 - DNA, 121 bp, Homo sapiens
  source 1..121: mol_type = other DNA
actttgttttccctgaggaactagtaagcattgcccatccaccaaccagagccatagaccrtgtcatgttccctttttgtcttgtctactaggaagctcagagccaaactggatgcttttg

SEQ ID NO: 54 - DNA, 121 bp, Homo sapiens
  source 1..121: mol_type = other DNA
ttggacattttattggcatcaatctgactaaagaaacagttaggtttctaaaaatatcatragattgattcggcacctaggagtagggggcaattggaaaccagctaaagatgctacagga

SEQ ID NO: 55 - DNA, 121 bp, Homo sapiens
  source 1..121: mol_type = other DNA
ccccacgtggcctcctcgaggcctgaaccctgggttgaatggcaaagacttgtgaaggatraggctgcatttcagtaaaacctccccagcgaggggcaccagagcccacaggcagatgcgg

SEQ ID NO: 56 - DNA, 121 bp, Homo sapiens
  source 1..121: mol_type = other DNA
aacactggcagtatctagatatctccatgtgcagagtcagaaatttcagagagcatttgtraagagtaattgctgttttgtttttaaaagattggcagatcaagggaatattctggctgtt

SEQ ID NO: 57 - DNA, 121 bp, Homo sapiens
  source 1..121: mol_type = other DNA
tccagaacgatttgagaataagaggcagggcacaaggatggtacttaacaaacttctgtcrcctaagcatggcaagaataagctgcagagaaaatgggagtgcagaagaaaatggtggaga

SEQ ID NO: 58 - DNA, 121 bp, Homo sapiens
  source 1..121: mol_type = other DNA
gtatagttaaaattttcattcaattagtcatacatacttcactttgaacttcctgtgtatmttattctgtgctcaattaaactattccttcccccaaattccattcccagacttcttattc

SEQ ID NO: 59 - DNA, 121 bp, Homo sapiens
  source 1..121: mol_type = other DNA
tgtcaggcactggtctgtgtgcttaacatggagcactcttcaaaatgaccctatgtggtamgggctattagtgtctacattttacagatgaagttcatggggcaaagagatgagaaacatt

SEQ ID NO: 60 - DNA, 121 bp, Homo sapiens
  source 1..121: mol_type = other DNA
agagccccagtaaagatcggggcgctggggctgagaagggctgggcacgtctttcttcctrtgctccgctcttctctgtacttccagagcactccactcaaaggccagctttgacctcgca

SEQ ID NO: 61 - DNA, 121 bp, Homo sapiens
  source 1..121: mol_type = other DNA
tttctggcttattttataaactactgtagcacacatttttccctgaatggggatataaagmctcattatttccaaaagccaatggcagaataaggtttccatcctgagcccttccagggta

SEQ ID NO: 62 - DNA, 121 bp, Homo sapiens
  source 1..121: mol_type = other DNA
tttaaattaagtgtttatacaaatatttgcgttcatacaaagacctaaggtacattcactraggtgggaccccagatgagagtcactaccagcctcagagtgtagctcagtgacatccccc

SEQ ID NO: 63 - DNA, 121 bp, Homo sapiens
  source 1..121: mol_type = other DNA
gtcaaccagtgctcctgcctcagtcgtgttttgcttttaaccatgtcttcctggaatgacrcttgaaagggcagtcatcatgtgttagcccagaatgaactcaccggaatcccacatttac

SEQ ID NO: 64 - DNA, 121 bp, Homo sapiens
  source 1..121: mol_type = other DNA
ctttattttgatgaactgttcaaatgtcatggtaaatcattaatcactgaaaattttgttrtttcttgtagtttggcaaatgctctcacactgtatcttttgagttcacaatttcatctta

SEQ ID NO: 65 - DNA, 121 bp, Homo sapiens
  source 1..121: mol_type = other DNA
ggtgnacttgggagggggctggcactgctgctggctctgctggcaggacatcttggtggcrgattcaggagctgaaagagagtcaaacagcaagtcagacctaggcagaggccacccctgc

SEQ ID NO: 66 - DNA, 121 bp, Homo sapiens
  source 1..121: mol_type = other DNA
ggttgctgatcagacacgtcaacacatgcctctgtgttgacagcactgcctgcagctctcmaagcatcctgcatctccggcaagcaccagactagcctgagttcccaacacaagcactcca

SEQ ID NO: 67 - DNA, 121 bp, Homo sapiens
  source 1..121: mol_type = other DNA
aaatatatattccttctaaaatcttgaaaaataactacaaaacaaattacccttagtcatrcttctcagggataagcacatttggtgtaatttcagtcctagacacacagatacagttaat

SEQ ID NO: 68 - DNA, 121 bp, Homo sapiens
  source 1..121: mol_type = other DNA
ggacaggtgcagccggggtgtgctctgcctcactcctgggagtcacgtccacacccatccrcacatacttggaaaatatgggtcaaaaatgccaaggagcaagttacttcaaaaagtgcag

SEQ ID NO: 69 - DNA, 121 bp, Homo sapiens
  source 1..121: mol_type = other DNA
gaaaatgttctttttttacttcctaatacagagcctttaattgatcactgcagttcttttrgcggtaaacttgtttgtaatctctatagttgatgcttcatgtaagtcacttgttaaactg

SEQ ID NO: 70 - DNA, 121 bp, Homo sapiens
  source 1..121: mol_type = other DNA
cgaccccgtgctggcccgcactctcggcctccttatctggtttaggaatgcgcggtatccrcgctcgctcgcgcgggagccacgcctcctctcccccccgcccccgagaccgccacacgcg

SEQ ID NO: 71 - DNA, 121 bp, Homo sapiens
  source 1..121: mol_type = other DNA
aattaatatagtaatattagaaaacaaaaaccaattaattttttcaatagatgcagaaaarttatttggcaaaattcaactcccatttatgacagaatctgtcagaaaactagtctgccat

SEQ ID NO: 72 - DNA, 121 bp, Homo sapiens
  source 1..121: mol_type = other DNA
caatcctatgtgttctaccttaccgccatctcacaaatctcacccttctgggttccagctrtcattgcctctgctcatgccctcattagcaatcaagtggatttgtgtattaggctcctgg

SEQ ID NO: 73 - DNA, 121 bp, Homo sapiens
  source 1..121: mol_type = other DNA
gaactcaccaggaaactataagtcagctggtgcactgctggtactcatgaaatcacctatsagggtgttgctgaacttgctgtaaggaagtctcctgcaggtgtgccactgaacttgtcac

SEQ ID NO: 74 - DNA, 121 bp, Homo sapiens
  source 1..121: mol_type = other DNA
caggggttgggggagctccctgagaattggaatgaagaaatgggaagcaggagacctcctrccctgaagacctctccagctgtggtaactgagaggatgtgtgggatggaggctgggcggc

SEQ ID NO: 75 - DNA, 121 bp, Homo sapiens
  source 1..121: mol_type = other DNA
agaactttattttaaaataattttaaaatctttcccttccccaacaagaaaaaaaaaaaaraagaagaagaaaaaggaaagggactctctcttacttggaataatttcttttttccctccc

SEQ ID NO: 76 - DNA, 121 bp, Homo sapiens
  source 1..121: mol_type = other DNA
gaagcgcatcatggaagtggtgggcacacccagccctgaggttctggcaaaaatctcctcrgaacacgtgagttggtgcccgccagccagcagctccctctcctggctgagcccccaggct

SEQ ID NO: 77 - DNA, 121 bp, Homo sapiens
  source 1..121: mol_type = other DNA
atgcattttataagaatgtatacaagcaaagggcttcatgttaaacaaactgaaatagttrggatggggaacgggattgtggatgaagaaaacaaactcaggggcaaacatgaatgaactt

SEQ ID NO: 78 - DNA, 121 bp, Homo sapiens
  source 1..121: mol_type = other DNA
gctggattcattttctcctggatttttgatagctgctcccgccagcgctgtggtcacttgrcctgggcctgcagatttggttgttgctatgctcatagcacctgttgcaggactcattgct

SEQ ID NO: 79 - DNA, 121 bp, Homo sapiens
  source 1..121: mol_type = other DNA
caggctgggggaaactctgtagaaaaagattatgagaacctagatactttccacagtccamatgaaccctgggttttctagactatgtgagtcccattaaatgctgaggaacactgggtgg

SEQ ID NO: 80 - DNA, 121 bp, Homo sapiens
  source 1..121: mol_type = other DNA
agaaaagggaagatgcttgagctgatcccctaggtatagcttctgaaggtctggcttcttrctagatttgctgacctagactccatgctgctcatcctacccccttgcccatgtcctccct

SEQ ID NO: 81 - DNA, 121 bp, Homo sapiens
  source 1..121: mol_type = other DNA
aagccctaacccaaagcctttcacagctcagactagacagctacaaaacagaagactactmttttgcctagtagagcagcaaaaataaaaatcttgaaaacattttttaaagttttgatga

SEQ ID NO: 82 - DNA, 121 bp, Homo sapiens
  source 1..121: mol_type = other DNA
tcagctaaaaccttgaaaagcagtaatgtgttttctcatataccatatttcccccattacrtttattgaatatgacttcacatttatgtttgtgcagtggttacagtgttgtatgtttttc

SEQ ID NO: 83 - DNA, 121 bp, Homo sapiens
  source 1..121: mol_type = other DNA
ggccacaagggtgtgagcttccccggctgcctccacanccacagtgcccccaagccccccmagagccatcttaccccaggaggccatgcagtgtgagagtcccaacagccccccacaggcc

SEQ ID NO: 84 - DNA, 121 bp, Homo sapiens
  source 1..121: mol_type = other DNA
atggaatctgctagagatttgggcagtgtttatatatagaagttgggactctcactctctrgtgctctggtttctctcccttgttttntggcagctattnttaccccaaactgttctctag

SEQ ID NO: 85 - DNA, 121 bp, Homo sapiens
  source 1..121: mol_type = other DNA
ctttggagcagtgataacctttacttttctcctttttcttgcaaacattattgctagtcaratcttgtactaggcactagaataaaaggggaacaagacaaagtcctacttcttaaggagt

SEQ ID NO: 86 - DNA, 121 bp, Homo sapiens
  source 1..121: mol_type = other DNA
cccatcatctgacttgaagtaatatctttttattcctacgaaatataaggtaatcagtaartgtatcccacactttgctgtgcttttctcattcttaccctactttttttgatagttgggc

SEQ ID NO: 87 - DNA, 121 bp, Homo sapiens
  source 1..121: mol_type = other DNA
cttgttaaaacaagataataaaaatatgtacttgtactttctaagataggtcttttttttmtactgccctctgccactttcacttaagtttttcttttaattttattgttccagttttgca

SEQ ID NO: 88 - DNA, 121 bp, Homo sapiens
  source 1..121: mol_type = other DNA
gttggtcctggaaaagaaagaaaccaagagattatggggactcaatgggcttcttaagagrgaataagttgaaatcaatgaccagaagaccctgatggaagtggaggagaatcatctcagg

SEQ ID NO: 89 - DNA, 121 bp, Homo sapiens
  source 1..121: mol_type = other DNA
tgtgccctcggcagctttccctgggctgcacctggtgggtgatgctggacggcagggactmcagggaggggtgagaaggcnccaaggaaccacgtgctgggtgaggcggccccaacccggg

SEQ ID NO: 90 - DNA, 121 bp, Homo sapiens
  source 1..121: mol_type = other DNA
tcacacaccacttggagccacggaaagactgctgattgccacagtaggggccctgattgcrgtaacagatgcagatgagcctagctcctatagctccacttattctttttaatgttatctt

SEQ ID NO: 91 - DNA, 121 bp, Homo sapiens
  source 1..121: mol_type = other DNA
cagcctcccccctgggctctggactagcaggatactgaacacagctaataggttctaagtrctgtgctaagtgtgttcagcgaattggccaagtttatgttcacaccaactgagatagaaa

SEQ ID NO: 92 - DNA, 121 bp, Homo sapiens
  source 1..121: mol_type = other DNA
ttgtatagttatgtatataattgtatcatctctcctgttgaaactgaaaactgcatgagartgagattcattgttttgtgtctttttagccaccagataaatgagcacagttgctggcata

SEQ ID NO: 93 - DNA, 121 bp, Homo sapiens
  source 1..121: mol_type = other DNA
tcatttatctggtggctaaaaagacacaaaacaatgaatctcattctcatgcagttttcartttcaacaggagagatgatacaattatatacataactatacaacatggcagaaggcaaag

SEQ ID NO: 94 - DNA, 121 bp, Homo sapiens
  source 1..121: mol_type = other DNA
ataaaagcactagatttccttttaactccaaaaaaggataatttattcatagaacttcccrtgttctcatcaaggccatctacagaggtgttcagaacaataattcagaaataggacacaa

SEQ ID NO: 95 - DNA, 120 bp, Homo sapiens
  source 1..120: mol_type = other DNA
actcctttcctccttaggtttggcattggatgtgtaaattctggaaaaaaaaaaaaaaamctttgcgtttcacactccactttgcagaacaccagtggagtctttccggtctcctgcctc

SEQ ID NO: 96 - DNA, 121 bp, Homo sapiens
  source 1..121: mol_type = other DNA
cattatttaaaatgtcatttttgcacgtttaagacaagcgtttatttagcactatgctagrtattttggaggatacagagacacacaaaacatantttctgacttcacacatgcttaagat

SEQ ID NO: 97 - DNA, 121 bp, Homo sapiens
  source 1..121: mol_type = other DNA
caaaaacacttctttctgtggaagaggcataggaatgagacaagaacaagaaatggaaacrctgatgactagggctgttattttagaattattatcattattatatanatattaattatat

SEQ ID NO: 98 - DNA, 121 bp, Homo sapiens
  source 1..121: mol_type = other DNA
aacagaaagtccaacaagtcctcgcttcgcactgatggttctggaaacagccacgaagcawagcgaccnccgtggaangaagccgaattcaccatccacacaggccgccaatgggagcaag

SEQ ID NO: 99 - DNA, 121 bp, Homo sapiens
  source 1..121: mol_type = other DNA
tgacagagggaggctctgtctccaaaaacaaaacaaacaacaacaataacaaaaagtcatragagttatagatgttatgttagtctcattctccccattaacccagcctcacctagacatt

SEQ ID NO: 100 - DNA, 121 bp, Homo sapiens
  source 1..121: mol_type = other DNA
cccagtaaatatacccatagtagatgaaaaataagctatactgaaacttaagaattgatcrtggatctatgcaatgatcatcaacaaagttttcccaggtaaatcaagttgatgtttacta

SEQ ID NO: 101 - DNA, 121 bp, Homo sapiens
  source 1..121: mol_type = other DNA
gactaattcagagaaagccacaataagttgctgatgtatttgggtggtgatgcagagaaamggaaggggtcaggaatgactgcaggcctggggctgctcggtttggggtggggggtggtgt

SEQ ID NO: 102 - DNA, 121 bp, Homo sapiens
  source 1..121: mol_type = other DNA
ttttgtaagctactattttgatcctagtgttttaaccaatagaatggattgacagcagctrgaagtgcataagctgaggtttgttatagatggagtcatatgttggcctggcatggtggct

SEQ ID NO: 103 - DNA, 121 bp, Homo sapiens
  source 1..121: mol_type = other DNA
aaaaaatcctgtgacactgaaactgatcttattcttctgaaattataattcattgtcttcrttggggttttccaacattctgagtatatcttacagaatgaggtatttctgttcacttgaa

SEQ ID NO: 104 - DNA, 121 bp, Homo sapiens
  source 1..121: mol_type = other DNA
ttctacaagattcctttaagtagggcatacctttatgtttctaataatccctattctcaaratataaaagtttaattataccccatttatctccaggtagaatttcccataagctcattac

SEQ ID NO: 105 - DNA, 121 bp, Homo sapiens
  source 1..121: mol_type = other DNA
gacaggtagccccctcaaccccaaggtactggtggcagagtagggagctgggggctaggtrtccactctggctaactctggccaactcccttctctctgagcctcagccagcgccattccc

SEQ ID NO: 106 - DNA, 121 bp, Homo sapiens
  source 1..121: mol_type = other DNA
aggcctggggaggcaggatgtgctaaagggcagagcccaggatgggaaccaggggaccccrgaacaaatgtgactgttaatgaataactttgggccagtgaagttacctcttttggcttca

SEQ ID NO: 107 - DNA, 121 bp, Homo sapiens
  source 1..121: mol_type = other DNA
ttatgaggagattttatcaagattttcaaaacttacaccaaccgcagaagtcactgtgatmatctctggactaagtgttcttctcaattgagcatcaagatcctctagaggttgctgggac

SEQ ID NO: 108 - DNA, 121 bp, Homo sapiens
  source 1..121: mol_type = other DNA
atgtgaaaactactccagtggctgactgaattgctgacccttcaagctctgtccttatccrttacctcaaagcagtcattccttagtaaagtttccaacaaatagaaattaatgacacttt

SEQ ID NO: 109 - DNA, 121 bp, Homo sapiens
  source 1..121: mol_type = other DNA
aattgggtggtaaggccacaccctccctggcaacaggttctgctgtgaccccccacccacscgggtcaagcacatgtcccacagtcgggaatggcgagtggactcacgagggccttcaggc

SEQ ID NO: 110 - DNA, 121 bp, Homo sapiens
  source 1..121: mol_type = other DNA
cattatctcttacagaccctttctgatgcctcctgggccagtgggagaaccatgggctctragaggtactgcttactgcagaaccttcaggaagtttttaaggcctctgagcttcagtttc

SEQ ID NO: 111 - DNA, 121 bp, Homo sapiens
  source 1..121: mol_type = other DNA
gagcatgttgttttgaggaataataaaaatccagaccatcttaaaaaaaaaaaaaaagccmtatgaaaataattatgcaaaataggattctcctctactaacatgactatattataaatta

SEQ ID NO: 112 - DNA, 121 bp, Homo sapiens
  source 1..121: mol_type = other DNA
ttacccctaatgctcttcctccacatttctgcacagcttcctcccttactgtaatctttartgtttactcaaatgtcaccctatcagtgagccctcccctaaacacccttactttaaattt

SEQ ID NO: 113 - DNA, 121 bp, Homo sapiens
  source 1..121: mol_type = other DNA
ggagggcgtggagggcgtgggagcgtgggaggcgggagtggagtggaagaagagggagagrtggagcaaagtgagggccgagtgagagcgtgctccagcctggctcccacaggcagcttta

SEQ ID NO: 114 - DNA, 121 bp, Homo sapiens
  source 1..121: mol_type = other DNA
tgtatatgtaccacattttcttttatttttttcttcagagagacacgaaacaagtaatccrgaggtctatgactaaagctaaaagaaaaccatataacttagagctgctgtaggcaaatac

SEQ ID NO: 115 - DNA, 121 bp, Homo sapiens
  source 1..121: mol_type = other DNA
tgatttggactgtttaaatatcttttctttttctttttttttttttttggaatcagattcmccgtccccatagctaaagaatttaaatttgtctttatgatgctgttgtttttaccttttt

SEQ ID NO: 116 - DNA, 121 bp, Homo sapiens
  source 1..121: mol_type = other DNA
ggcagtgggggaaatgttggtagaggaaacaagacatgcgacagcacttacttgagctggrgaagaacacagtggttagaggaactgagagaaatccagtgttnctggctcttagaaagtg

SEQ ID NO: 117 - DNA, 121 bp, Homo sapiens
  source 1..121: mol_type = other DNA
atctgtttttaatttacatatgtaaccttgacttataaattacttagaagccaaggcgtartattagcatttagagcaaagtctggctatgttaagaatgctaacgttatgaagaatcttt

SEQ ID NO: 118 - DNA, 121 bp, Homo sapiens
  source 1..121: mol_type = other DNA
gccaaaatatcacacttacaaaattgtccctcacacttttctttacaactgttcgtctcgrtgttacatccagaatcccagtagaaatgaacggtgaaaaacagagtgcaattccagcctt

SEQ ID NO: 119 - DNA, 121 bp, Homo sapiens
  source 1..121: mol_type = other DNA
ttgagtgcctctctaggccaagcagtttacatatatgctctcattttaaatcctagtaacwgctatatgaggtaagtcttgttattctaattctatatagagagtttctgaggatcaggaa

SEQ ID NO: 120 - DNA, 121 bp, Homo sapiens
  source 1..121: mol_type = other DNA
tgaggctaaagatattgatcacatcaataaaaatttaagaagtttcacactggctactgartaaagtctagaactatttgtaaaacagagattcagagactttaagaataacaagatggac

SEQ ID NO: 121 - DNA, 121 bp, Homo sapiens
  source 1..121: mol_type = other DNA
atgagaggtgggatgctgataattcatgagaagccatggcatcacaatttaattacagtawcacttatggttgattgtgaagaaatgacaaatgaacccagtaccttgagagcccaaatga

SEQ ID NO: 122 - DNA, 121 bp, Homo sapiens
  source 1..121: mol_type = other DNA
gatagtattcaaataacctaacatttagatttctgagcatggttaacagcattacacagarttgtgtgttgaaactgccaatttaaggacttacttagcctccaaacttgttatttcttgg

SEQ ID NO: 123 - DNA, 121 bp, Homo sapiens
  source 1..121: mol_type = other DNA
ccttcaggcctcagctaggtggtctcctcccctaggaagctattcttgacactataccctragcttccanaggatggtaagttcacccatgctgtgctgcagttacctgactggttttctg

SEQ ID NO: 124 - DNA, 121 bp, Homo sapiens
  source 1..121: mol_type = other DNA
tccgtcctggactaggctgacccctgtgtcgttacccccagaaccagcctgtgaggatgcrgatgaggatgaggacgactatcacaacccaggctacctgtgagtggccaggtgggaggtg

SEQ ID NO: 125 - DNA, 121 bp, Homo sapiens
  source 1..121: mol_type = other DNA
gccctttccaccgcaccccggtgcttccagcctcaaccgctggagaccaagcctcctgagrtggggtaaagcgtacaggcacagctaggggcacagaaaggcctggaggccctaagacgtt

SEQ ID NO: 126 - DNA, 121 bp, Homo sapiens
  source 1..121: mol_type = other DNA
aatacatgtatgtacactgagagggcaggaggaactttatgccaaggtcttcataagcccraattaacaaattgccaagtatgtcaaaacttgtgtctgtgttggcaggacctgtgaagca

SEQ ID NO: 127 - DNA, 121 bp, Homo sapiens
  source 1..121: mol_type = other DNA
gggaccaggtcagcagattcttccagatcaccaaggtagccctccacagtcagatggaccrgacccatgggtctgaaggagatgctgattgtttctgctccatgttgtttgggactgcctg

SEQ ID NO: 128 - DNA, 121 bp, Homo sapiens
  source 1..121: mol_type = other DNA
ctggggccgtcctcaggtaccgtcgttcgcggcagggctgcggccgggtcgggacgagagrgagggagggatccgccccagccgggaagccccgccccgcttctccgaggtcgccctagcc

SEQ ID NO: 129 - DNA, 121 bp, Homo sapiens
  source 1..121: mol_type = other DNA
tagtagtcagtactttgcccgcttatagaagaatctttggtttcacctattgcttggctcrattagttacttgtttcttaattatgaccctgttgtttatttttctgcaaagagaanagtt

SEQ ID NO: 130 - DNA, 121 bp, Homo sapiens
  source 1..121: mol_type = other DNA
ttacatttttcatactaaattgtctcagtctttggggctttattattattattattttatwggcagtgttagatcttgtagccaaaaaaagatttttttttcctcttttggttccaaatag

SEQ ID NO: 131 - DNA, 121 bp, Homo sapiens
  source 1..121: mol_type = other DNA
tcccaatcaaaatacagatttcaaaaatcccccataaaattccctggttcctccctgtagrttggtgatcttttgagaatgcaatttcaccttataatgtatttcaacgaaataaaagttt

SEQ ID NO: 132 - DNA, 121 bp, Homo sapiens
  source 1..121: mol_type = other DNA
tattagactctttaaagcctcttcctaaaagaaagaaaacctaattaccaagttttatcartttttctttctttataatattttttatatcctcatccattcatttttattttcatattca

SEQ ID NO: 133 - DNA, 121 bp, Homo sapiens
  source 1..121: mol_type = other DNA
gaaataactgattcagtcatcaataaatgctaagccatttagtatgaaattattcccaccratttcctgctaatctcaaaggagaaaagtattttattacacagaaaagatcaaacttatt

SEQ ID NO: 134 - DNA, 121 bp, Homo sapiens
  source 1..121: mol_type = other DNA
tagaggcacagggctgcccacatgagaagcagctcagtgacagactagcacctgagattaraaggtctgctcttccagtttgcagcaggatttgaaaccactttttttctttctgcccctg

SEQ ID NO: 135 - DNA, 121 bp, Homo sapiens
  source 1..121: mol_type = other DNA
actgtttaggactcagcagacccagcaagaggcatctgccctttccccagccacctccccrgcaagcaacctgaaatctcagcagatgcccaccatttctctagatcgcctagtctcaacc

SEQ ID NO: 136 - DNA, 121 bp, Homo sapiens
  source 1..121: mol_type = other DNA
atggagttaggtgttcagtaagggctacttccactctcccaaatcatttttaaggtcttcrtgtaatagatattgagagactaaccaagtcagcctgacttgagttcaagttgtacttaaa

SEQ ID NO: 137 - DNA, 121 bp, Homo sapiens
  source 1..121: mol_type = other DNA
gatactgtcttaaactgaaatgtctgaaatcaaatgtaacatctttttctcattatatccrttgtttatttcggtataggtagtcacaaaaagtgtactgcctagttgtctaagcaaatac

SEQ ID NO: 138 - DNA, 121 bp, Homo sapiens
  source 1..121: mol_type = other DNA
catatcacctaataaaacccttcattctgatgaggaaattgaggcccagagatgataaacrgctaagagtttcaaacagctagtttgtgaggaagccaagacaaactaagtctgtttagtt

SEQ ID NO: 139 - DNA, 121 bp, Homo sapiens
  source 1..121: mol_type = other DNA
ctcttctagctattttttaaaaaccaagaaaatacagtatctggttttatatctgcctgargggaaatgatactctacatttattataaatgaaaagtttgccctaagtacattaccttaa

SEQ ID NO: 140 - DNA, 121 bp, Homo sapiens
  source 1..121: mol_type = other DNA
gctgtccacccccacccccaactccaagcctgggcggtctggatccggctgtacagtttgrccacctggccccctgtcccatcccaggtgcctccggactccttcctctggccgcctcttc

SEQ ID NO: 141 - DNA, 121 bp, Homo sapiens
  source 1..121: mol_type = other DNA
ggttccctgattggcccactgggtttcccaagggagcaaaggacacttgggggctgtcccrttctcagagctgacggccacccactgctgacggctgcctcactcccgcagaggtggacat

SEQ ID NO: 142 - DNA, 121 bp, Homo sapiens
  source 1..121: mol_type = other DNA
aagaaaaccatataacttagagctgctgtaggcaaatactaatactacgttatttagctastgtgatgaaaaaataaacaggtgtcacatgagaaaaaacaaggcacacaggtaacgagac

SEQ ID NO: 143 - DNA, 121 bp, Homo sapiens
  source 1..121: mol_type = other DNA
agaatcagcgcagcagaaaattgtattggtgaaataggaggcagagtcaagaaacatactraacataagaaattagctgagacgtgaagtgaatgaatgctcacagatgtgcaggggaagt

SEQ ID NO: 144 - DNA, 121 bp, Homo sapiens
  source 1..121: mol_type = other DNA
gaaataagcacattttagaatatgttttgcatacacatataagaaacntgtaccaattttrtaaatattgtatactaaatgctattctgcaccttcctcttttttttaactcaatatattt

SEQ ID NO: 145 - DNA, 121 bp, Homo sapiens
  source 1..121: mol_type = other DNA
gggtgaactcatggtgaattagaaggtactctgccacagctcatacactttttgtcatgtrctattccactctcaagttactgtcgtctgcagctttgaagtaggtttgcctactgacatn

SEQ ID NO: 146 - DNA, 121 bp, Homo sapiens
  source 1..121: mol_type = other DNA
ttttagaagtgttatcctgaggctatttacaattttttctttgtgacgctcacatcaggartcattagcaaacctgtcgtaatgccagataaccaatgcctggctggcacaccaataactg

SEQ ID NO: 147 - DNA, 121 bp, Homo sapiens
  source 1..121: mol_type = other DNA
atttttaaaataatttatataattaaattcctctccagtcccaagtgtgaaaagcattaawtactctggagtctcttgagccatttccatttttaaaactagtcagtttttcaagttacag

SEQ ID NO: 148 - DNA, 121 bp, Homo sapiens
  source 1..121: mol_type = other DNA
ttttaaatctcactctggcttctaagtggtgggcagcaggaaggagacaagaatgatgccrattagaaggctgggacagaattccagatgaggaatcagtggtggcttagattagggtggt

SEQ ID NO: 149 - DNA, 121 bp, Homo sapiens
  source 1..121: mol_type = other DNA
ttatttataggtactataattaaaatatgtacctgcaatataatgtgggaataattttacrtggtaagggagggagaaggtacaggtcagagaaggtnacaaaaatattcagagtaatttc

SEQ ID NO: 150 - DNA, 121 bp, Homo sapiens
  source 1..121: mol_type = other DNA
atggggaggggagagatttctacttctgcaatgaagtaccagtaccataactagtactagrtttacccttttgtaataaagaactggaaattggacgaggaatatgtaacagctgttttca

SEQ ID NO: 151 - DNA, 121 bp, Homo sapiens
  source 1..121: mol_type = other DNA
atacttgtgattgcattgagaagttcttgtagtgtgttttcagctataacagggggttatrttcctctctaaaatggctttggctgtcagctcctgtactgttctatgataattcttagct

SEQ ID NO: 152 - DNA, 121 bp, Homo sapiens
  source 1..121: mol_type = other DNA
ttaataatttgatgaatgtcagtgcaaaatgaaatacatttttttctggcatatttatcamcaaacaaagatcaagaccatcagataaaacaattgatactttgtgctttaaaatttcatt

SEQ ID NO: 153 - DNA, 121 bp, Homo sapiens
  source 1..121: mol_type = other DNA
aacacccaagcttatatagacatttccatgaaagaagtgctgtggctgatcagaagggaarttaatgacttttaataaattattttgagtagtcatttggaaaaaaaggaaattagactgg

SEQ ID NO: 154 - DNA, 121 bp, Homo sapiens
  source 1..121: mol_type = other DNA
tccctggcaggaagtccttctgcctgtctgacctgggtctctcctgctttgattttagtamaagtggactctgccattctctgcctttccttttctgactggtgctccctctcttccatct

SEQ ID NO: 155 - DNA, 121 bp, Homo sapiens
  source 1..121: mol_type = other DNA
ctgtttatctgctgttccatcattcattcattcattcgccaaacatctgagcatatcttaratatatatagcatatagatgctaatctaggcactgaaaagatgaataataagcccccttc

SEQ ID NO: 156 - DNA, 121 bp, Homo sapiens
  source 1..121: mol_type = other DNA
tgttctcaaagaggtcccagcttcatgggagtgggacctgcaaacaatcaaccaccaccasgataattactctaagttgcacatgcaagagaacagaacttgcctgagggagttgaggctg

SEQ ID NO: 157 - DNA, 121 bp, Homo sapiens
  source 1..121: mol_type = other DNA
tcactgcgtctgactgcagacccggctggaagccccctggaaccaggcccaagcctccccrccatgaattttgttcacacaagtaaggcctcggggtgaggtgatgggggtggctgaggtg

SEQ ID NO: 158 - DNA, 121 bp, Homo sapiens
  source 1..121: mol_type = other DNA
ccagggagatgcagggtcaccaaggagaggcctggccttggcacctcctcaggaggaagamgcagaagcccaggagaccccccaccctggctggggcgaaactgccatccgataccagagg

SEQ ID NO: 159 - DNA, 121 bp, Homo sapiens
  source 1..121: mol_type = other DNA
atgtgtggggcaaaatgctagggatagtgtagtaatccagtggagctgttactactcctaraccagaagagaagaaaggaagggccaattaccagaacctagaaggagagaggcagataga

SEQ ID NO: 160 - DNA, 121 bp, Homo sapiens
  source 1..121: mol_type = other DNA
tccctcactctacccaccccccaggaggtgagaatggtaagtcacttttattaatttgggrcaacacataaagccgggatagttgctacctggatcacagaatccctaggtgagaaatagc

SEQ ID NO: 161 - DNA, 121 bp, Homo sapiens
  source 1..121: mol_type = other DNA
ttacctttttcttgggacacggtgaatattaatattctcatttcaatgtaatttctttttratttttgagttttcttcaactgtgcttcttgtttattaaacatttagttcattctctttt

SEQ ID NO: 162 - DNA, 121 bp, Homo sapiens
  source 1..121: mol_type = other DNA
acagcatgttttgtggggacagaattgaagaaaggtgccatccttaaaggaaaggtcaggrtaagaatgtgggagagccagatgatacagctcttaaggcattaaatttaagccactacct

SEQ ID NO: 163 - DNA, 121 bp, Homo sapiens
  source 1..121: mol_type = other DNA
ttggctggggattaggaggttcgagggtctctatttttcctgaattatgcccattaatcasantatcaaggaaactggatataccatgacagaaataaaaagtccactttttctaagtaag

SEQ ID NO: 164 - DNA, 121 bp, Homo sapiens
  source 1..121: mol_type = other DNA
aacaaaatagaagcaagcagaagaaaacttccacaaactcccaccatcacatctacacagmaactgtgcccattgactccaccatctgttactatggaagaactgtttgtactcctagcta

SEQ ID NO: 165 - DNA, 121 bp, Homo sapiens
  source 1..121: mol_type = other DNA
taatgaatgaatctgaggaatacaaatggagcctgttggagattaatgttcaaacatcatrtcttttagtcacttttaatctttacttttgaaataattttctcctcctttattttactgt

SEQ ID NO: 166 - DNA, 121 bp, Homo sapiens
  source 1..121: mol_type = other DNA
ttacaagtgtgagccaccatgcccagcccaagaaataatttttaaaataatttttataccrtagttgtttataaagctttccatagtaagttccttcttatggtgaaatcagccattctaa

SEQ ID NO: 167 - DNA, 121 bp, Homo sapiens
  source 1..121: mol_type = other DNA
gtccctgctgcccatttctctaccaccactcttaatgtttacaaatggcaaagctccagcrtggacaacatagtaagaccccatctctacaaaaaaaaaaanttttttttaattagctggg

SEQ ID NO: 168 - DNA, 121 bp, Homo sapiens
  source 1..121: mol_type = other DNA
ctgaccaggtacctacttggctaaggcttggagcccggctgtgaagggctgagaatcaccraggttgagctctgcaagcctgaacccggatgcttccgcacagaaagggccttggatgctg

SEQ ID NO: 169 - DNA, 121 bp, Homo sapiens
  source 1..121: mol_type = other DNA
catcttttgggaacagggtgtggacaggtacaacacatgcccccaggaactcatcaccacrgggattccaagagggctgaggccagccctgcctgtggtcttcagccttctttccaggctc

SEQ ID NO: 170 - DNA, 121 bp, Homo sapiens
  source 1..121: mol_type = other DNA
ggggcacgttctccccatgcaccccgacgacccacctgggtgcctgtcccttccacaagcrtgcactgccttcccggggtgtgccaggcaccgccaggtgccgaggggcagcaggggccag

SEQ ID NO: 171 - DNA, 121 bp, Homo sapiens
  source 1..121: mol_type = other DNA
gttctaagacatgagtgctgggctccaggagaaggggcaggcatgggctaaaaaggatacmaggtcctggatgggggtgggagcccaacataaaagaggagcaaccatgagagaagggcaa

SEQ ID NO: 172 - DNA, 121 bp, Homo sapiens
  source 1..121: mol_type = other DNA
accaaaaaacactccaaagaaatgaccaggtcagtctacgatggaagaatagatacaagcrtaaaaagcaaagaaactggatcactcaaaattagagggggtgacatcagatgatccttct

SEQ ID NO: 173 - DNA, 121 bp, Homo sapiens
  source 1..121: mol_type = other DNA
gctttaagggtggaattccagcaggcactgcattttcccagcttttgtactcagttactcmgagctcattcctttgcagctctaaagctcttttgtgtttcatcatcttgctcgaaacctt

SEQ ID NO: 174 - DNA, 121 bp, Homo sapiens
  source 1..121: mol_type = other DNA
cccatgcccgagggggctggggtacaggggccatctccagtgggaacagggactgcaccarccaagtcccagaaggtagaccccagcccagaggggacacagccctctgccacangttcca

SEQ ID NO: 175 - DNA, 121 bp, Homo sapiens
  source 1..121: mol_type = other DNA
tccctattaatagtttctggtgtacctttgcagatatttgcaatgttatacaagttttacmtgcctgtgggggttgggaagattgtaatcctttttaaaaattacaggttaaaattataga

SEQ ID NO: 176 - DNA, 121 bp, Homo sapiens
  source 1..121: mol_type = other DNA
ggcagatggtcgtttggctgaataccttccctgggggaggccagtcaaaagagaagcaaartgagggagcacgcagggcccttgtgaccctgagatccaagcttaccacctcttcccagag

SEQ ID NO: 177 - DNA, 121 bp, Homo sapiens
  source 1..121: mol_type = other DNA
aaaaaaaccagtgtaggggaacacaatagaaaagggggtgaggagcagggtaaataaatgrtatcagagaggtagagaacagacttgcccagggagggtatcctttagggttgggcggaat

SEQ ID NO: 178 - DNA, 121 bp, Homo sapiens
  source 1..121: mol_type = other DNA
ctctctgttaccaggtgttccaactgtgtgggaccaatgcttgctggagatgctgcagagrcctcagtgcccagtgtcaagcaggctaagaaagcctttacagcagcttcaggtacccagc

SEQ ID NO: 179 - DNA, 121 bp, Homo sapiens
  source 1..121: mol_type = other DNA
ccaaagttgtcgtagactcttgataaacttaccagccagaaagctgcttcacaccatgatrgactctgaagttgtctggatagcagaccttgttttctgcccactatgcatagacgtggca

SEQ ID NO: 180 - DNA, 121 bp, Homo sapiens
  source 1..121: mol_type = other DNA
gcatgaatccaaggccttaattttgatcactttgtcttgatgagcctggtaggtcactttrcaatttccagagatatctacctaaaaagaaaggcaagggcataatgcttgggattccttg

SEQ ID NO: 181 - DNA, 121 bp, Homo sapiens
  source 1..121: mol_type = other DNA
atctgaaaaatgaaggtaataagtagtgttcacttcatgggattattgtgtgagggagaartgaataatccacacgaagtgcttggcacagagtaggtgctcgttagccaacagccaccag

SEQ ID NO: 182 - DNA, 121 bp, Homo sapiens
  source 1..121: mol_type = other DNA
ggaaaaacctcgcattccacctgtttacggttacatgagttcttcttcctctttaaaagtmtcttttttgagacaaggtctcgctgtcaccaggctgaaagtgtaggggtgcaatcacagc

SEQ ID NO: 183 - DNA, 121 bp, Homo sapiens
  source 1..121: mol_type = other DNA
gtctctggacctttgctggggtctccgtatctaacactcttccttaactttgcttcttaamctcttactcactcgtcaaggactaactccttgtcttcagcacactttgcccagattgaca

SEQ ID NO: 184 - DNA, 121 bp, Homo sapiens
  source 1..121: mol_type = other DNA
ggcagcacagtgtagttcagggaagggctgactactaatgccacggaagagctccagtggrtcccgagataaagaagaaaaccaggattctgtcatcctcagaaggtcatcagtctgctgc

SEQ ID NO: 185 - DNA, 121 bp, Homo sapiens
  source 1..121: mol_type = other DNA
aggaaaacaggttttacagaaaacaggttggtatgacttggccctgttcagggatatcttmatctttgacaggggttcaatatgtaagttcatttgctggtgggttaactacattgtagaa

SEQ ID NO: 186 - DNA, 121 bp, Homo sapiens
  source 1..121: mol_type = other DNA
actgcactccagcctggccaacagagcaagaccctttttatatatatatatatatttacartgcaatataattactatgatagagaagatattgaaaccagacttgaaaaaatttgtagta

SEQ ID NO: 187 - DNA, 121 bp, Homo sapiens
  source 1..121: mol_type = other DNA
gccaggggctggggcaaggggagaatgggagttcgtgtctagtgggtaggaagtttcagtstgggaagaggagttctggaagtggagggtgacagtccacagcaatgtgagtggacttcat

SEQ ID NO: 188 - DNA, 121 bp, Homo sapiens
  source 1..121: mol_type = other DNA
tggaataaatgggggcaatctctcatttctggcttgtttccaagttgggaattacctcctmcttcttgaaagttacccataatttaatttcagtagctttggcttgataccttctaagatt

SEQ ID NO: 189 - DNA, 121 bp, Homo sapiens
  source 1..121: mol_type = other DNA
gattcatgagttcggtgtgtgagagcctttaaccttgggaactggacctttgtctttcccrttttaagtcctgcaagtgtctaaatgttttctttcagagtgtgacaaaggcagcattcac

SEQ ID NO: 190 - DNA, 121 bp, Homo sapiens
  source 1..121: mol_type = other DNA
acaggcagcccacgctccttcaccaggcccagtgggagccttagttctcccgggccagccrgtgcagaataagaaagggaacggagaagggtgagaactacctgtgtcgtaacatcctgcc

SEQ ID NO: 191 - DNA, 121 bp, Homo sapiens
  source 1..121: mol_type = other DNA
gtcgaggctggggccatttcttcatcctttcctggggctgcatcagaaaatagaatgggtrggcatgcctggtgggcctccttttaaccaagggactctgggattctcttagacacaccaa

SEQ ID NO: 192 - DNA, 121 bp, Homo sapiens
  source 1..121: mol_type = other DNA
aggaagcaaggttttgctctttattagacgctgtcaggaagaagggataaccctattaccrggcgtctcactaagtcttatctttggggaggtcaactagagcaaggccaaagctgccatt

SEQ ID NO: 193 - DNA, 121 bp, Homo sapiens
  source 1..121: mol_type = other DNA
gccccagctgtcttgaattcaggtcagaaggtgggcccagtctggccctaacttaagatcratttctgattataatcataatcagattttgtggcttccttatggtccctcaaccatgcca

SEQ ID NO: 194 - DNA, 121 bp, Homo sapiens
  source 1..121: mol_type = other DNA
ttctcaggctaatttagccctactactaaggcatgaccttcttgaggtctacccaatatcrcatgtattacaaagtctctccactctggctgatggcaacatgaattatttgtaaacctgt

SEQ ID NO: 195 - DNA, 121 bp, Homo sapiens
  source 1..121: mol_type = other DNA
gagtaaaactgtattttaaaggctgaaataattagtggaatctaccttgtatatttattgrtttnggcanatgctatgttctccttattttctctgggcacttctatcaagagattgacca

SEQ ID NO: 196 - DNA, 121 bp, Homo sapiens
  source 1..121: mol_type = other DNA
ggaccccaggaggctgtttgcagcaattgtatctcatcacaactttgttattctccactcmgcttcaaagttttcaaataaactgtcatgaaaggtcaaaaatattatgtatctgggccca

SEQ ID NO: 197 - DNA, 121 bp, Homo sapiens
  source 1..121: mol_type = other DNA
cctgacgaccaggccagaactagcattcagccctcttgggcaggcccatggggtggaaatrgtgccacctgcagaagtcatcgcccctgtgctgggctggcctctgtgccctccatgtctc

SEQ ID NO: 198 - DNA, 121 bp, Homo sapiens
  source 1..121: mol_type = other DNA
tcactgtgcggcccggttcctaacaggccgcagaccagtctgtggcctggggtttggggamccctgctatatgccaaacctgaaatgtcatgttctgccactgcagcagtgcttgtgctat

SEQ ID NO: 199 - DNA, 121 bp, Homo sapiens
  source 1..121: mol_type = other DNA
atagcaactggagtccaaccttggcaatgtagcaagatgtaagagtgagagagagagagarnagagagaagacangaaggaggagaagagaagaaggagaaggagaagaggagaggagaag

SEQ ID NO: 200 - DNA, 121 bp, Homo sapiens
  source 1..121: mol_type = other DNA
cttgatccacctgttctttttagatgtctgcacccccagcccccactgctctttcaggtcrtcttatctacttgctttcatcagggaagtctgaccgtcccgctacagtagaagacctgaa

SEQ ID NO: 201 - DNA, 121 bp, Homo sapiens
  source 1..121: mol_type = other DNA
ttttttattttgtttctctagtgttatggcagtggaggtgggaatttagtccccaggtggracaagggaagttttttcattttggagctagttactgggagtaagggagggtggggtgggg

SEQ ID NO: 202 - DNA, 121 bp, Homo sapiens
  source 1..121: mol_type = other DNA
tttaggtacaaaatagccacctgtactagtgggctagtggccactgaattgaacagtgtasaggacaacccaccatcgcagaagttcatttggacaatgctgatctagaacgttccagtga

SEQ ID NO: 203 - DNA, 121 bp, Homo sapiens
  source 1..121: mol_type = other DNA
ggaaccccttcattatttcaatctcaattgacttcttgttaaaatggtttttatctaccaragaaacttcagatttattaggtaataatttacatgtttgtttattttggaattcagtgag

SEQ ID NO: 204 - DNA, 121 bp, Homo sapiens
  source 1..121: mol_type = other DNA
tgcncctgttgtcatttcccttctacctgaaaattttttcctgaatataggtcaaaagttmttgtttctttgcatgtctagtgggataatatagcaactctgggttgtgctgggttcctct

SEQ ID NO: 205 - DNA, 121 bp, Homo sapiens
  source 1..121: mol_type = other DNA
atctagagccaggtctagcatgtcgttggtgctcaaaagatatctgttgaatggatgaatrtattaagagtacagtctgctattaaactggcctttaagataaacaattaaactatcccag

SEQ ID NO: 206 - DNA, 121 bp, Homo sapiens
  source 1..121: mol_type = other DNA
tactacaagcattttgtggggaaagggcnactgatttttatacagtggtcatagggagaargcagaggcagattccactgagaaggctccttgttgaagctactggctaatagaaagggtc

SEQ ID NO: 207 - DNA, 121 bp, Homo sapiens
  source 1..121: mol_type = other DNA
ttgagtaaacaattggatgtacatttcagttgtttggggggaggtcagagtatattcattrtatttgcagccatgggatatttaaaatcaattagggctgggcacagtggttcatgcctgt

SEQ ID NO: 208 - DNA, 121 bp, Homo sapiens
  source 1..121: mol_type = other DNA
agaccagagaaaacctcctccacacagatataataggtattgatattcatcttttctttartgatcatatcatgcagtttctcaagtccttcctttaggccatctcctatgattgcgcagg

SEQ ID NO: 209 - DNA, 121 bp, Homo sapiens
  source 1..121: mol_type = other DNA
gcataagttaccagaagtggaatgtgagcaaagggtgtggatattttgacagttttatgcmccctttattttttgagtaccactacttcttccttctaataggttataccaatttacatct

SEQ ID NO: 210 - DNA, 121 bp, Homo sapiens
  source 1..121: mol_type = other DNA
tgaaaactatttgtaatgaaaggtttgaaagttaccaagagactgagagattgacaccaarttggtgagatttgcatcatttaaagaaaaatttcagtcaaattaaatttagtagagttta

SEQ ID NO: 211 - DNA, 121 bp, Homo sapiens
  source 1..121: mol_type = other DNA
ttaaaatgggaggagtcgacgaagcaaggaatgtattcacctgagcaataatttgaaatgrgaggagtcaatgatacagagaatttactcacctgaaattaaaaaggatgaggacagggct

SEQ ID NO: 212 - DNA, 121 bp, Homo sapiens
  source 1..121: mol_type = other DNA
ctttaaagaaaaatgttgaacgaattcccatcattttattacaagaggatgagagaagagraggaagtttaagcaaaagaatctgatgtccttttgcaacagagaatttgtgagaaatgtc

SEQ ID NO: 213 - DNA, 121 bp, Homo sapiens
  source 1..121: mol_type = other DNA
atgaggaaatgggtctttgagaaatgaattcagttacccttgtcacacagctactatgaartctactatactatgttatttagcagaaaattgttgcaggatcaaagcttccaaaaataca

SEQ ID NO: 214 - DNA, 121 bp, Homo sapiens
  source 1..121: mol_type = other DNA
cccaagttagatatcggtgtcattaataagacctttctccctgtctcatggaatgaagtamaaatcattttaatactactccacaaatgtccattgaatccaatctttgttttatatgtac

SEQ ID NO: 215 - DNA, 121 bp, Homo sapiens
  source 1..121: mol_type = other DNA
ttgcggccctatccttcattttgcagagtcttggtggattgaaaagctgctgtggggtgcraggggtatgaaatggcatagtttaggttggtgcggatgtccacttaagtctccatggaga

SEQ ID NO: 216 - DNA, 121 bp, Homo sapiens
  source 1..121: mol_type = other DNA
catagtactaagcaatttgaattaattacctaatcatacnatttgatccttatgacttgasaggaagtaggaattattattcccaggctgcagataaggaaatcatctcttgaatctaatc

SEQ ID NO: 217 - DNA, 121 bp, Homo sapiens
  source 1..121: mol_type = other DNA
atgccccacataggcttttataggagaggaggtcctggaagtgaagacagagtccctgtcsccttcaggatgcctcctgtgggatgtcccagccccctcacttggagctgtccagatcagc

SEQ ID NO: 218 - DNA, 121 bp, Homo sapiens
  source 1..121: mol_type = other DNA
gaacaagcccatgattgaatgggccctggggggcttccagccttctggccctaagggcctrgagccaccagaaggtaaatgagggcacccagctttctgggacccctgcccgccaggcaga

SEQ ID NO: 219 - DNA, 121 bp, Homo sapiens
  source 1..121: mol_type = other DNA
aagtagaataacaaaattactatgacataaaaagctaatgttggcttatctaggaacattmacatttaagtcagttagcctaaattaaaagatctgttcataaaggaaatagattatatct

SEQ ID NO: 220 - DNA, 121 bp, Homo sapiens
  source 1..121: mol_type = other DNA
tatgtgtctgaaatgcttcttaggttcaagtccttccgtttatttccctatacatagttcrggcttttctcaccagtttacctgaagtataaaaaccttcctacgtatagttcttctcctc

SEQ ID NO: 221 - DNA, 121 bp, Homo sapiens
  source 1..121: mol_type = other DNA
aggttgagttgaatatcgcatactcaattgctaacacggttagaggaacatcaccagtgtraagtaccagtgttaagtccctgggtctgttcctcatggaggcccttctccttttttcagg

SEQ ID NO: 222 - DNA, 121 bp, Homo sapiens
  source 1..121: mol_type = other DNA
cagctcctggaagaaacccggggcttcctccgacggtgagcaatgagcagaatggaggtgraagagggagtccttgtgattcttaaccattagcattctctgagtcttaccactggaagca

SEQ ID NO: 223 - DNA, 121 bp, Homo sapiens
  source 1..121: mol_type = other DNA
tcctgcctggaaattctgtttacttacaaaatcaaattggatttttttttttagccaaagraattttaaggagagttgtttttttattgaggcaaaattaccataacatacaactaaacat

SEQ ID NO: 224 - DNA, 121 bp, Homo sapiens
  source 1..121: mol_type = other DNA
ataccnaggagtagcattgctaggtcatagtagctgtatgtttaattttacgaggaactgmcaaattgttttccacaatagctgcaccattttattttcccaccagcaatgtccaagagtt

SEQ ID NO: 225 - DNA, 121 bp, Homo sapiens
  source 1..121: mol_type = other DNA
ctgaggccagggttaggttgtgattgattcaggatgtttcttaaggataggatgtaggacrtgaaagaaactgaggatgactgggtttggccttgagcaactgggtgatcagggtggagca

SEQ ID NO: 226 - DNA, 121 bp, Homo sapiens
  source 1..121: mol_type = other DNA
aggtggtcagaagggatacgacagacacaggccacctggctagtgagagctagggccaaamtttgagagctttgtgctccttaacagaagagttgcctccagtttaaaaaaaacccatgtt

SEQ ID NO: 227 - DNA, 121 bp, Homo sapiens
  source 1..121: mol_type = other DNA
cagtacagccttttgcctcaagctaggggctagaggcccagagcagcatggatggccagargcagctcccctgcggcctctctcccttcctgtctctggctgggtctgtctggccatctct

SEQ ID NO: 228 - DNA, 121 bp, Homo sapiens
  source 1..121: mol_type = other DNA
gatttgaactaagaatgtgtcattccagaaccagggctcattgccttgacaacatacagcrcaaatcctgtactcaggatgtcaccctcttcagaatgttgctgctgtcactcaagctggc

SEQ ID NO: 229 - DNA, 121 bp, Homo sapiens
  source 1..121: mol_type = other DNA
tcacctgtcaaatgaggtaataaggatactcatctcctagggccagttcgggtctagaggrgatagtgngtattgagggttggtacagcacctagaagtactccatcaagttaagatgtta

SEQ ID NO: 230 - DNA, 121 bp, Homo sapiens
  source 1..121: mol_type = other DNA
atggcagccgctgtcattacacagacatcacgtttgtgaactgtacatacattcgtgggcrcacacacaacctaagcgatattcctccactcctcacacancctcccacacttgcatgcat

SEQ ID NO: 231 - DNA, 121 bp, Homo sapiens
  source 1..121: mol_type = other DNA
aactggaacntgaatgaacgccttcgtgactgcagtgtgcatgcatgcaagtgtgggaggrtgtgtgaggagtggaggaatatcgcttaggttgtgtgtgngcccacgaatgtatgtacag

SEQ ID NO: 232 - DNA, 121 bp, Homo sapiens
  source 1..121: mol_type = other DNA
agggtctggtagcagatggtcctgtgctggctttggcagaggtgggcacacatggtgtgtsgtgggagcctgaggaggggcctcacccggcctgaggaaactcactgagaagtggaggccg

SEQ ID NO: 233 - DNA, 121 bp, Homo sapiens
  source 1..121: mol_type = other DNA
gcacttggctgtggccaggctgggcggaggtgatggtgggaggcccagcagccttgatagsgtaggggtgggggtgggcccccaaagggtccttggcacaagaggccaactgcatggacag

SEQ ID NO: 234 - DNA, 121 bp, Homo sapiens
  source 1..121: mol_type = other DNA
ccctctgccactgggacatgcccaaccaagtccccagcctgccaggccagatatctcgccrcgccagtccccgagggccccgcctctatcaggacagccccaggtgggctcacctgtgtgt

SEQ ID NO: 235 - DNA, 121 bp, Homo sapiens
  source 1..121: mol_type = other DNA
tcaggagtgcacagccccacaccatggtcaacagcatcagcccagagcactgtcatcgccrcagccgagcccctgggcaggtgcttcccaggcatgactccctgacccctcgtgtcgaccc

SEQ ID NO: 236 - DNA, 121 bp, Homo sapiens
  source 1..121: mol_type = other DNA
agcccggcgcctcaaaggtggctacaaaaactaaggcaacgggtgcatctaaaaagctcaraaaggccacgggggctagcaaaaagagcgtcaagactccgaaaaaggctaaaaagcctgc

SEQ ID NO: 237 - DNA, 121 bp, Homo sapiens
  source 1..121: mol_type = other DNA
acaaaatcaaaaaaacccctgaaaatggaaagttttatcatgattcatttggctacaaaartctggcctaacctgaaatgatttggtggttatattagttatctattagtacaaacaaatt

SEQ ID NO: 238 - DNA, 121 bp, Homo sapiens
  source 1..121: mol_type = other DNA
tggaaggagaaagctgtggtgtctctcggctcttcctgaggcccagctgtatcctcttctrctcctccagggatttggctattcagcccttccttggatgccctcagtaaaatattaccct

SEQ ID NO: 239 - DNA, 121 bp, Homo sapiens
  source 1..121: mol_type = other DNA
agtgatcctaccacctcggtctcccaaagggctaggattacaggtgtgagccatcgcgtcrgccaggaaatttcaaaagcaagatgcaacaaacagttaaaagaaggaatttctttcaacc

SEQ ID NO: 240 - DNA, 121 bp, Homo sapiens
  source 1..121: mol_type = other DNA
ggtggaagcttacacatctccctcagcctctggtttttcagcacttgggattggggttaarcctttaaaaacggctgtcaggtttgatctcagtgtaacgacatggccagtgcctgttccc

SEQ ID NO: 241 - DNA, 121 bp, Homo sapiens
  source 1..121: mol_type = other DNA
ccatcaagaagtggctgcaagaatattctacattcaaagacatctcaaaagtaactatctrttcacataaacagtttaatacaactcaatccaattcttgccaattctaaacaagaaaaga

SEQ ID NO: 242 - DNA, 121 bp, Homo sapiens
  source 1..121: mol_type = other DNA
ggacagccagtggaagatcagaggacaacagagtaaagttataatgcagaacctagagcamagcgccaaacctgtcttcccacctggatgataggaggagagtttgggctctgctgggaaa

SEQ ID NO: 243 - DNA, 121 bp, Homo sapiens
  source 1..121: mol_type = other DNA
aaagtgtngcagagcagatagaaactagaaaagaaactggaaaagagcaaatggaactggraaaaagaactatgactgaagggggtcaacatgatgagttgtgtcattctggcccaatagt

SEQ ID NO: 244 - DNA, 121 bp, Homo sapiens
  source 1..121: mol_type = other DNA
tttaaagttgtacaactgccgactacttccagcataagcagagaggtgataaggtcacacraactctcttgcagataacaatgataaaaatagaataaagtaataattaaaaatnagaaac

SEQ ID NO: 245 - DNA, 121 bp, Homo sapiens
  source 1..121: mol_type = other DNA
tatttggcctttctgaaacaccataatcactgtacatataaacatttttaataaaagagtrtatccttagtttatcataaattttttataagatanaataatcattaaagtgactaaggna

SEQ ID NO: 246 - DNA, 121 bp, Homo sapiens
  source 1..121: mol_type = other DNA
tttatcttatttgtttcaaagtctcatagaaacaaaggatgcccattatcagattcctttrtataccttgtcncattttttaagctttctagatcttaatttgcctttgtgtagaaggcag

SEQ ID NO: 247 - DNA, 121 bp, Homo sapiens
  source 1..121: mol_type = other DNA
ggttgcccaggcttacttaacactcttgaacgtcaaaacccacgctcagtacccgcttcamgtggaagtcggtgttgagatacaagcataggaacgaactcaaggctaacagctgttctgt

SEQ ID NO: 248 - DNA, 121 bp, Homo sapiens
  source 1..121: mol_type = other DNA
tgtgttcttttctgtaatcagtcatgaataaagaaatctatcttctagcactggatgccartagatttgaatgtgagttcagacctatgagtattatagacaaagactagattgagagctg

SEQ ID NO: 249 - DNA, 121 bp, Homo sapiens
  source 1..121: mol_type = other DNA
agtggaacttttcctgcataggaggtttagggaaagcttctggagttgaacaccagagttmagttttacttatttttttatttttctcagagacaggatttcgctctgttgcccaggctgg

SEQ ID NO: 250 - DNA, 121 bp, Homo sapiens
  source 1..121: mol_type = other DNA
gttcttgagttacagaaattacagcagatatttaattatttaaatcattcttactaaganrttgaaattcctttagattctagaaagagtctaaagcagggatgatagtctgaccacacta

SEQ ID NO: 251 - DNA, 121 bp, Homo sapiens
  source 1..121: mol_type = other DNA
gagaaaacactgtagaaaaagcgcatgagtggattacctaatgatatactgctttaccctrtaactattttctacaaaggaaaatcactattccatgtattcattagcttaagagagtatg

SEQ ID NO: 252 - DNA, 121 bp, Homo sapiens
  source 1..121: mol_type = other DNA
ggtagatagagcagaggttgaaggactgagccctggggcatgccatatgaggctgccggcrgacagaggtgcacagctagtgagaaaaaaacaaggcctttttgtagttctgaagcctcaa

SEQ ID NO: 253 - DNA, 121 bp, Homo sapiens
  source 1..121: mol_type = other DNA
actcagccctagaaactgttgggggaatgtgcttccccacagccccagatggatcacaggrgtatgggagggtctaagcattttgttgagaaggcatttaagcacctactgggtggcaggc

SEQ ID NO: 254 - DNA, 121 bp, Homo sapiens
  source 1..121: mol_type = other DNA
gctccagggccaggaaggagggtccaggaactccaagccctccttaggttggagggagaascaagtcagctggaccagcatcccagatttcagtccaggctgagtgnccttggatgggtta

SEQ ID NO: 255 - DNA, 121 bp, Homo sapiens
  source 1..121: mol_type = other DNA
tttccctcagaataatttattagtgttttaaacaaattcagagatagcaaaagtttaagcratcagttatttttctgtaaaatgaaaggtttattctcatatacaaggctgtcaaatattt

SEQ ID NO: 256 - DNA, 121 bp, Homo sapiens
  source 1..121: mol_type = other DNA
caattatggtagcacacattaaatgaaataggaggataatataagagcaggcccatagttrtatatattagtggactaaatgagtgatatctttattgtgatcatcatggtcacatttatt

SEQ ID NO: 257 - DNA, 121 bp, Homo sapiens
  source 1..121: mol_type = other DNA
ttgtgctccttaacagaagagttgcctccagtttaaaaaaaacccatgttcaggccaggcrtggtggctcatgcctgtactcccagcactttgggaggccgaggcaggtggatcacttgag

SEQ ID NO: 258 - DNA, 121 bp, Homo sapiens
  source 1..121: mol_type = other DNA
atcgtggatcagggaattactgagttttcacaatcatcaaaaagagagaagcattagttamccttccctagttaggttcctttaattatcattttcatgtgtttctaaaaatctcatgctt

SEQ ID NO: 259 - DNA, 121 bp, Homo sapiens
  source 1..121: mol_type = other DNA
atttggatgcccaaagaagcaccctctggcacctcctggagcctggagcccccagagcctrggctcagctgctctagcccgacatttgggattccgcaagcactttccttccaaggttcag

SEQ ID NO: 260 - DNA, 121 bp, Homo sapiens
  source 1..121: mol_type = other DNA
agagcgagactcgtctgaaaacaaacaaacaaacaaaacaaaacaaaacaaaacacagagmtctttccatgtccacatacatatatatacatctacctcaataacttaaataactgcacag

SEQ ID NO: 261 - DNA, 121 bp, Homo sapiens
  source 1..121: mol_type = other DNA
acccacggcacctgccctggggactctgccccagcctggggctggcctctgggctttcccrtagcctccaatctgattgtccctaggcccctgaaaaggccagcatccaccggctgatgga

SEQ ID NO: 262 - DNA, 121 bp, Homo sapiens
  source 1..121: mol_type = other DNA
gggaaaaaaggaaagtgcacttggaagagatccaagtgggcaacttgaagaacaagtgccraatagcacttctgtcatgctggatgtcagggctctttgtccactttgtatagccgctggc

SEQ ID NO: 263 - DNA, 121 bp, Homo sapiens
  source 1..121: mol_type = other DNA
tttaatcttagaatttatagctactaaagagaaagcaacaattgaagaacatatttcaagrcaatcagaatgctgcacagagaaaaagagattacgagctgtgaaggctagaatcagaagg

SEQ ID NO: 264 - DNA, 121 bp, Homo sapiens
  source 1..121: mol_type = other DNA
tccagacttctgctgggtgtgctggatctctctgtcacatccttcacaggttttctgatargtgccgagtggctgggagggcttttgttgacagcctttgtttttaaaccccaagcatctt

SEQ ID NO: 265 - DNA, 121 bp, Homo sapiens
  source 1..121: mol_type = other DNA
ctcagcaataacatcttaacttgatggagtacttctaggtgctgtaccaaccctcaatacrcactatcncctctagacccgaactggccctaggagatgagtatccttattacctcatttg

SEQ ID NO: 266 - DNA, 121 bp, Homo sapiens
  source 1..121: mol_type = other DNA
aatgttgagtctatagcaaagtagggcactttagaactgatttgcattttcgaaaactggrctaaatttaaaacaccaaaaatggtgttatataatgcagaatgcaaaaagaaactcngac

SEQ ID NO: 267 - DNA, 121 bp, Homo sapiens
  source 1..121: mol_type = other DNA
attcactgttccaaacagcccgtccaacctactctacagatgggactcccaagacactacrgggatcccctgtgtgccaagtcccgggggaagctgctagagaaggctgggacgtccttgc

SEQ ID NO: 268 - DNA, 121 bp, Homo sapiens
  source 1..121: mol_type = other DNA
tgctcacctctggcagggacagatcagagtcctctgtgtgacactctgtgtccccagttgrggaaggcggaaggagctgcgggctcctttggtattctaggctggagagccacctggctag

SEQ ID NO: 269 - DNA, 121 bp, Homo sapiens
  source 1..121: mol_type = other DNA
cggggaaagctctgccccgttcctccggagcccagtgcgcccctggccaagttctcccagmgtccactctagggcctgctagcaccctctcgggcggcgcgccctctgcgtacctaaggag

SEQ ID NO: 270 - DNA, 121 bp, Homo sapiens
  source 1..121: mol_type = other DNA
accatttaagtgtgacatctatacccccagaaaagaacaactcgtagtacacagctcagtraatttaggcaacgggagcgcagccctgtgacaaacacatagctccccggaagcccctcta

SEQ ID NO: 271 - DNA, 121 bp, Homo sapiens
  source 1..121: mol_type = other DNA
attcacaggcacaatacagcctcaaactcctgccctcaagcgatcctcctgcctcagcttmccgagaagctggatcttcagatgtgcatcaccacacacagctccccaattactttcagtt

SEQ ID NO: 272 - DNA, 121 bp, Homo sapiens
  source 1..121: mol_type = other DNA
tttgtccattttgtttgaggcgagattctccgcacgcaggagagtgatattcaatatacamttagtagcactcatggctgctgctacttgttgataattctgccaagaaaagattcgttga

SEQ ID NO: 273 - DNA, 121 bp, Homo sapiens
  source 1..121: mol_type = other DNA
ctctctactctggctacaccaccctcctcacttatctgttaacatgtcagacaggccctcrctgccaggctgttgcacttgccattccctccacctgggaagcttcttccccgttaattct

SEQ ID NO: 274 - DNA, 121 bp, Homo sapiens
  source 1..121: mol_type = other DNA
atgtgtgtgtgtgtatatatatatatatatacacacacacacatatacatacgtacacacrttttggaacaactaaatccagctatttaacatatgcattagctcacatacttatcttttt

SEQ ID NO: 275 - DNA, 121 bp, Homo sapiens
  source 1..121: mol_type = other DNA
catctcataaaacttactgtaataagcaggaaaattgagaattattgctttataaattgtrtttatctgtattggaattatttaggtcattgatatctagtttatcttttgtagtttattt

SEQ ID NO: 276 - DNA, 121 bp, Homo sapiens
  source 1..121: mol_type = other DNA
gtgccaggcaccgtgtgttggttggagtggggacatgagggggcatggcagaggttgtgtrtaggactgccagagctgggcagaaaaaccccgctgccaaaggcctcctagcgggcagctg

SEQ ID NO: 277 - DNA, 121 bp, Homo sapiens
  source 1..121: mol_type = other DNA
gagtcctagagaggttaccagccactcaggtgatgggcctgggatttgaatccagcccccrcagggttttcctcttggctcagtttcccagaatgggggcactggctgtgatctgaagttg

SEQ ID NO: 278 - DNA, 121 bp, Homo sapiens
  source 1..121: mol_type = other DNA
tggacacaaggttttgactcacccaagaaaaggggacctggctgcccccgggcctgagcartgggtcatgaggtcacaacttcagatcacagccagtgcccccattctgggaaactgagcc

SEQ ID NO: 279 - DNA, 121 bp, Homo sapiens
  source 1..121: mol_type = other DNA
cgggcagagggcagagccaggctgtatcgaggggcggcgctgggaccctcctcgcccagarttcctactcatccccagcacagaagtgctctgtagggccagctgaggacaccccggttca

SEQ ID NO: 280 - DNA, 121 bp, Homo sapiens
  source 1..121: mol_type = other DNA
tgagaccacgtgaggctaaaatcagactaaagaatgatcttggcgtctgtggtgaataatsaaattgagtatcatttctttacttttgctggaaatgtgtagttactaaaatagtaggcat

SEQ ID NO: 281 - DNA, 121 bp, Homo sapiens
  source 1..121: mol_type = other DNA
ggcactctgacaaactgtcacagcattttccccaagattattatgtgggaactccagagasggagtccatctgttctccttctcctcccctaccccaaaacagcccctggctcaccttggc

SEQ ID NO: 282 - DNA, 121 bp, Homo sapiens
  source 1..121: mol_type = other DNA
caatggcctaactgacccaagaagggaaagaaaatctaaacagactgataaatacaaaatraaattcagacacttacagagcagccaggcatggtggctcacacctgtaatcctgtcactt

SEQ ID NO: 283 - DNA, 121 bp, Homo sapiens
  source 1..121: mol_type = other DNA
ccttagtctctcaaagtactaggattacatgtgtgagccacagcacctggcctatttaatrtattatagatatataagggccagggcaggctgcctccagtgttggggggaggagtcttct

SEQ ID NO: 284 - DNA, 121 bp, Homo sapiens
  source 1..121: mol_type = other DNA
ggttacacctaaattctttttacctatctgtagagagtggtctttctgagacttcttcagrtttaatatctactgatttatctgtaatttgaataaactcatgtaattagagtcccagccc

SEQ ID NO: 285 - DNA, 121 bp, Homo sapiens
  source 1..121: mol_type = other DNA
attcaggacttaaaatgttcgtagtcattttaaaaaataaattattatagcttaaaccctsgatattacaaaaaaaaaaaagctcattgcagccaaaaatacctgaagaatcagattaana

SEQ ID NO: 286 - DNA, 121 bp, Homo sapiens
  source 1..121: mol_type = other DNA
tgtaagatacgtgatctcttccattatctaatctaggagaagaggaaggggaggttgaagwggatcagtgtgtggcnggaggagaattatttgccaagaatagtgtaatcaatcccataaa

SEQ ID NO: 287 - DNA, 121 bp, Homo sapiens
  source 1..121: mol_type = other DNA
tgggataatatagcaactctgggttgtgctgggttcctctgaggattatggcagaaatgcratggaatagggaaaaatattaatagttctctggggtagaggctggaaggattcctggaag

SEQ ID NO: 288 - DNA, 121 bp, Homo sapiens
  source 1..121: mol_type = other DNA
gattacaggcatgaaccaccacgcccagccatcagacaagtttttaaataaggtctcacawgtgttcacggtaaaaataaagattttcaggacacaagtatctactaaactctaaccttct

SEQ ID NO: 289 - DNA, 121 bp, Homo sapiens
  source 1..121: mol_type = other DNA
cggtaacttagaataattttcttacattccaggtacacaaaggcaatgataaaagctctamgagttagcttgaatatttcaaaaccataacagaaattgaattttaaaatttattaaggtt

SEQ ID NO: 290 - DNA, 121 bp, Homo sapiens
  source 1..121: mol_type = other DNA
gctcggagaagttgtttcttgttttaaatcaacaggtatcaagtggcagaatcaggattaragcccaggatgtccgatttggtgttgcacgtgccttccactggaaaacagcatggattng

SEQ ID NO: 291 - DNA, 121 bp, Homo sapiens
  source 1..121: mol_type = other DNA
tgacctcaagtgaatagggaagtgtggtcttaccctgcttctcccagagagaactggaacrtgaatgaacgccttcgtgactgcagtgtgcatgcatgcaagtgtgggaggntgtgtgagg

SEQ ID NO: 292 - DNA, 121 bp, Homo sapiens
  source 1..121: mol_type = other DNA
gccatcgcaaccggaangatgctgtccttggtaagaaatcagccacaggcgaccccctgcrgaggacaccccatcctgatgtgggccaggcctgggcctttggtttccctggagcattggc

SEQ ID NO: 293 - DNA, 121 bp, Homo sapiens
  source 1..121: mol_type = other DNA
acagcttagaaacccaacccataacaagagtctgacatttgggcactctggggtcccaccrtttttattttttatttatttatttatttatttatttatttattttttctttttttgagat

SEQ ID NO: 294 - DNA, 121 bp, Homo sapiens
  source 1..121: mol_type = other DNA
gctatgagacctggccatgtgaggtgaccacccctgtacaacagagaccattttgccatcrcccagggcagtggtgggttatatctgtggcagacccagcacacactggatcctgtcgaag

SEQ ID NO: 295 - DNA, 121 bp, Homo sapiens
  source 1..121: mol_type = other DNA
ccaccctgtgtgtgtgatgcccttatgtctgaatgtgaagggagcaaggacgggtacatcmagagctacgaataaccttgagttttggagactgggcactgacagctacaacttgggactt

SEQ ID NO: 296 - DNA, 121 bp, Homo sapiens
  source 1..121: mol_type = other DNA
aaagccagaaaataatgtattaagaccacaaatggccctatctgttccctatggtttcaawctaactaaaaccttatcaatttaacattctccagtcaatgctccttcttttgagacaggg

SEQ ID NO: 297 - DNA, 121 bp, Homo sapiens
  source 1..121: mol_type = other DNA
ctttttattttctaaaacagcactcggctgcaacaacaacaacaaaaaagcaagtaagctratactaccataacaattacttccaactaaacacatagaacacattaatttccagaaattt

SEQ ID NO: 298 - DNA, 121 bp, Homo sapiens
  source 1..121: mol_type = other DNA
gcatcacacttattacattttattttcccactccttcaaagcaaattgtagctgtattatrtttaaaatatttggcagtttaaaagtggtagtttaaagaatgtgatcatagcatttctat

SEQ ID NO: 299 - DNA, 121 bp, Homo sapiens
  source 1..121: mol_type = other DNA
gtgttatgttttcatgtaatagtgtcttggagaatgaggacttttgaggaaacccaaatartagttgcagatcctgttttttactaagctgtcatggagataaatccaaaatagtttttac

SEQ ID NO: 300 - DNA, 121 bp, Homo sapiens
  source 1..121: mol_type = other DNA
gcctggggcccagacgggctgcacaggcccctggaactcagcgagaaagaaatcaattccrtttttaaaaaacttatcgagcacctgtgtgatgtgatggctactttactagagcctggag

SEQ ID NO: 301 - DNA, 121 bp, Homo sapiens
  source 1..121: mol_type = other DNA
ttaatgacttagctccagcttctccacttcaaaatgaaaggaaaagtactatcaccacccrttagaattattatttcatggggaaaaaagatggattactatctcacaataagagcttgtc

SEQ ID NO: 302 - DNA, 121 bp, Homo sapiens
  source 1..121: mol_type = other DNA
tcatatacaatagagaaaaaaatttaaaataaaaatgtctaatactagaagaaatctgagrtatcttttacacgaaagtataaaagtgacaggaggggttcaagtctccgaattctgagct

SEQ ID NO: 303 - DNA, 121 bp, Homo sapiens
  source 1..121: mol_type = other DNA
ggcatctgcccttcccagcagggactgcctccctcactggcctcatgtgacctgttaatcraatcctgcaccagccccatggagttttcccatcactcattggggaggaagcagatgccca

SEQ ID NO: 304 - DNA, 121 bp, Homo sapiens
  source 1..121: mol_type = other DNA
cgcaatggatttatattttcatgagtgaatattgtttggttgagaaaaggttcagcattawttctgntcttatttttgtttcttataggtcaaagggctgggaaaccctgctcaaataagc

SEQ ID NO: 305 - DNA, 121 bp, Homo sapiens
  source 1..121: mol_type = other DNA
ccagctgcttatttgagcagggtttcccagccctttgacctataagaaacaaaaataagascagaantaatgctgaaccttttctcaaccaaacaatattcactcatgaaaatataaatcc

SEQ ID NO: 306 - DNA, 121 bp, Homo sapiens
  source 1..121: mol_type = other DNA
cttggcctaccaaagtgctgggatcacaggcgtgagcccccacgcctggcctcactcaacrttatttttaagacctcatcagttgatatccccatgaagtcctctcctcttcaattcagtt

SEQ ID NO: 307 - DNA, 121 bp, Homo sapiens
  source 1..121: mol_type = other DNA
ctattttagggtaaggcacggttcaccagcagattattctggccccagaataatctctccrgaggcaaactggtagtcaattgtcctaaactcaaaccctgcctccaactcttgtcctgag

SEQ ID NO: 308 - DNA, 121 bp, Homo sapiens
  source 1..121: mol_type = other DNA
agtcacttagccatttggccctgcaccttcgggagtaggggaatgattgcagagaggcccrtattgactaagtcccagatccatgagaggtgccatttcccagcttctgcagcagctgtga

SEQ ID NO: 309 - DNA, 121 bp, Homo sapiens
  source 1..121: mol_type = other DNA
gctacaggctcagctggagagccaagagaacccttctgatgcattctagacttttacaacrtaaagtggagaccctccaaaggccagaggagggaaagcaggactaacaaggcacagagga

SEQ ID NO: 310 - DNA, 121 bp, Homo sapiens
  source 1..121: mol_type = other DNA
cctaattttttttttnttttnacagagaagtttcacttcaagtcatggatgtctaaggtcrgtgcccaacttcttctttttgaagtttttcatttcacaaagtttcctgttatcaaaccaa

SEQ ID NO: 311 - DNA, 121 bp, Homo sapiens
  source 1..121: mol_type = other DNA
cagtaagtcgccgtctggcagtaagttagctctgcaggtgtggaccccaagaccacacacrgcctttctcaggtgcaggtcctgccaagcctcacttcgcagtggtgacaggcaaccccgt

SEQ ID NO: 312 - DNA, 121 bp, Homo sapiens
  source 1..121: mol_type = other DNA
aaatgagaaaacaaacctttgtccaatactggtcacaactttctcatcttgattgaatttmaaatttgatgtttttccccagaattttttcagcagatcattgagtacacagaggaatacc

SEQ ID NO: 313 - DNA, 121 bp, Homo sapiens
  source 1..121: mol_type = other DNA
ggtacccaaacccatgtggtggatcccccacagcatccatcacagcatcttgtccatggtragacccactgccaaatgaagtgtgagggattaacagtgttttgttccctcacaggcttgg

SEQ ID NO: 314 - DNA, 121 bp, Homo sapiens
  source 1..121: mol_type = other DNA
agtctgaggtggttggtgagtcagctatgagtagattgggattttctgcctgttctgaagmaaacttctgtctcgccttggggttccctttcttaccgccctggcccaccctccctggcca

SEQ ID NO: 315 - DNA, 121 bp, Homo sapiens
  source 1..121: mol_type = other DNA
ctttatgatgaatgtttaataagactgctttcttctggatatctagttgagatcagctgarcaacgagagttttatggctaaatggatatgaagacacgaggcaatttagggtcacggaga

SEQ ID NO: 316 - DNA, 121 bp, Homo sapiens
  source 1..121: mol_type = other DNA
tgtngataattttgtgttgttcagtatttgcataatcactgtgagggcaaggaccttgtawgttcttctgttcatcactgtattttcagtacccactagtgcctggcacatggtagataat

SEQ ID NO: 317 - DNA, 121 bp, Homo sapiens
  source 1..121: mol_type = other DNA
ttggtaacagaaaagttttgcatgcggagagcatcctagacagggaaaacaagtgaaaatrtaattagcaaaatcagaaaactaaaattcagtatgatgagagcagaaggaacaggctaca

SEQ ID NO: 318 - DNA, 121 bp, Homo sapiens
  source 1..121: mol_type = other DNA
gctgggctgagactacatgtagcaagggtattctttgacattgttgctcagggattgtccrtctttttctggtggggaggtacttttgatagccttgtagtctgatcattgtggaactgag

SEQ ID NO: 319 - DNA, 121 bp, Homo sapiens
  source 1..121: mol_type = other DNA
ctccctgcatcacacatgatgacgatactgtctgctgggcggggggaagcctgggtggctrtcagcatcagagcactcgaaactgcctggaatgaggctttatgggttgacgttgtttctg

SEQ ID NO: 320 - DNA, 121 bp, Homo sapiens
  source 1..121: mol_type = other DNA
ccctggggaagggaatgcagggttgctggggctgggcccagaagcagcagcaccagggaaraggattcgaaaaccctctctcttgtatgagggctttgagagccccacaatggcttcggtg

SEQ ID NO: 321 - DNA, 121 bp, Homo sapiens
  source 1..121: mol_type = other DNA
ttaagtctctctaggctcaagtctccctggagcatctgacaggtaatcactcgctctcagrccctggcgttgaaggcaagggaacggtgaaaagttactaattctattccttttcctttct

SEQ ID NO: 322 - DNA, 121 bp, Homo sapiens
  source 1..121: mol_type = other DNA
tttcaaggctcaaattgcatccaataataagctgtcttaaccggtcactttttatcaccartggttaattaaatccttgagtctcctaggataatttcttcttttcttgtttgaaatggag

SEQ ID NO: 323 - DNA, 121 bp, Homo sapiens
  source 1..121: mol_type = other DNA
ccctaaagcccacagcacaggccaccccagcatggctcctggaaccagtgtcacccgcccrtgtggcagctctagaggccaggggagcctggaagtagctccactactagcaagaggggcc

SEQ ID NO: 324 - DNA, 121 bp, Homo sapiens
  source 1..121: mol_type = other DNA
gagattaagtaatttgtctacagtcatgtggcaaagccaacatggagcccagctgtgctartctctgaagcccatgttcttaaactacccaggtctactacactggttgtcctctaccctg

SEQ ID NO: 325 - DNA, 121 bp, Homo sapiens
  source 1..121: mol_type = other DNA
attcaaagattggaatactatacagcaatgaaaaagcaaagtactagtacatttaataacrtagataaatctcacaaaacagtaaaaggacccagacagagtgagtacacactgtaagatt

SEQ ID NO: 326 - DNA, 121 bp, Homo sapiens
  source 1..121: mol_type = other DNA
aaagagttaaaacacatacaacactaagaagcctacccgaaccagagtaagtgctcagtgmgtgttagacagtgtcattgtcattattgccacctcttcagtcctgcccacacactctcaa

SEQ ID NO: 327 - DNA, 121 bp, Homo sapiens
  source 1..121: mol_type = other DNA
atgaagtcctctcctcttcaattcagtttccttgaggaattgagaatgccagatatgaacratttattaccgttttgtctttttgtttgctgtccctattgtttttatacccatgggttca

SEQ ID NO: 328 - DNA, 121 bp, Homo sapiens
  source 1..121: mol_type = other DNA
gcaaatctaggtatttctgagaagaaagaagattaatataggggactggaagattccacaracgttggaaggctagggaagcaaaagtcaggttggttactttcagaaaatccaggacatg

SEQ ID NO: 329 - DNA, 121 bp, Homo sapiens
  source 1..121: mol_type = other DNA
cttacacagtatacatactatatgatttcatttatatttagttctggaacagattaatctrttgtgggaaaaaatcagggtactaactgcctctggaaggtgatagaggagcagggattga

SEQ ID NO: 330 - DNA, 121 bp, Homo sapiens
  source 1..121: mol_type = other DNA
actcctatcatgatacagaacattcctaaaaccccagaaaattagcaataccctttcctartcaatccctgctcctctatcaccttccagaggcagttagtaccctgattttttcccacaa

SEQ ID NO: 331 - DNA, 121 bp, Homo sapiens
  source 1..121: mol_type = other DNA
gtaaggctgcccggcacgggtnccaggccccggaacggaggaaggcactgagcgtcaggcrgcctagaggccaggggtagctagaagactccctgggggctgtgtcggggacaggcctgag

SEQ ID NO: 332 - DNA, 121 bp, Homo sapiens
  source 1..121: mol_type = other DNA
ccaggggtagctagaagactccctgggggctgtgtcggggacaggcctgagctgcagagtmgaaggagcagttccctcctctgcaaagcaaacagaggaggcggccctggagggccggggc

SEQ ID NO: 333 - DNA, 121 bp, Homo sapiens
  source 1..121: mol_type = other DNA
ttgttatttttattttttgctgttgcctcctggaaacggacttgaagtttcttcccctatrttctttccctcagctcttgggggccagaaatcccaaagggagtccgctgccccggccctc

SEQ ID NO: 334 - DNA, 121 bp, Homo sapiens
  source 1..121: mol_type = other DNA
gccctgggagtacccatgaaaaattataagacttctggggatgtctgctgaagaaatcacsccaaagaaggcaagaatttangtgcagaaagttatagattgcagcattattttgtaactg

SEQ ID NO: 335 - DNA, 121 bp, Homo sapiens
  source 1..121: mol_type = other DNA
ggctcctgtccctggaagtcccaccagcccaagcctaactctgtgtttttgttctaaaccrgcagggtcctcctnccgcaggagtatcttgcagtccaactcccacgattgtcctgactgg

SEQ ID NO: 336 - DNA, 121 bp, Homo sapiens
  source 1..121: mol_type = other DNA
gaatgaacagagtgaagtagagtgataaggagtggcatgaatggaatggaaccaaactgamgtgcaaagaggtttaggtgactgctgtcactgggacagtcctccccaaccctcccacctt

SEQ ID NO: 337 - DNA, 121 bp, Homo sapiens
  source 1..121: mol_type = other DNA
ctttctgtgaggtctcaaggcttagtatttaatctctaattgcttacacttgtcgccttgraggactggaagatacatctttaatagtcctcagcagggctggatgccttcaatcccgcag

SEQ ID NO: 338 - DNA, 121 bp, Homo sapiens
  source 1..121: mol_type = other DNA
aagacttggaatgggtctaatgtattcaactggtcctcagatatttatagcctgctgtgtrctgggttatgggagatccatcacaaactgccttcctaaggctgcagggggtgggggattg

SEQ ID NO: 339 - DNA, 121 bp, Homo sapiens
  source 1..121: mol_type = other DNA
agaggagggatttaaaaaaaaacaggaaagattggggcatttgtctctaaaggactgtggrctcatttaagaagtttagtggtcattcttaccatctttgtggtttttcctgcctgcatgg

SEQ ID NO: 340 - DNA, 121 bp, Homo sapiens
  source 1..121: mol_type = other DNA
ttttgacaatcctttccttggaatgctgtgaaacacaacccattttttaatgtaataaaartagctcttaagcttttgtatactttagganacatcaaggataagtaagggcacattccca

SEQ ID NO: 341 - DNA, 121 bp, Homo sapiens
  source 1..121: mol_type = other DNA
gttaaattcttagcaagattttagcagttggaatccagcagtgtataaaaagggtaatacrtcatgaccaagtggatttcgttggtttaagtttgaaaatcgatggatgttatttactgta

SEQ ID NO: 342 - DNA, 121 bp, Homo sapiens
  source 1..121: mol_type = other DNA
acctttttggaatttgggactgggttaagagatttggggcctgtgtatgtctgtgtgtacmtggttgagagtgtatgcgtgtgtgtgtgttacatttttatctgagtcactgtgagaatat

SEQ ID NO: 343 - DNA, 121 bp, Homo sapiens
  source 1..121: mol_type = other DNA
tttcatttttccatcaacagagcataaaaaacttgagtaatgtgggcacaagggaactggrgggataacagctctgagggaagagagagaccctcccgtatcgctttatattgttttatac

SEQ ID NO: 344 - DNA, 121 bp, Homo sapiens
  source 1..121: mol_type = other DNA
gagggagaaattagctatggccagagtatagagaataagggaagtatgatttgtgaggagrctgtagaagaattaaggtcaggagcacacaggatgatgtaggcccagtgaagtgcgttgg

SEQ ID NO: 345 - DNA, 121 bp, Homo sapiens
  source 1..121: mol_type = other DNA
tgtatcaaccagccaatcagcacactgttgtgggggtcccaatcatgagtcagggattacrgggtcatcagcacatttgacctcatgagactacagcaaactaaaaggaatgtgcagctgg

SEQ ID NO: 346 - DNA, 121 bp, Homo sapiens
  source 1..121: mol_type = other DNA
aactaaccaatattaccgaattggtgggcattctaaaaacctgatgcgacatatagttgaraagattgtaaatggttctggctagtgaaagcacatttgagacatgtaattgtctggcata

SEQ ID NO: 347 - DNA, 121 bp, Homo sapiens
  source 1..121: mol_type = other DNA
accatctgaatggcaatctatgtagatttttgcagtgtgtctgtgtagtgtgctgggagcrggtatttgtatttatctctgtgtacttatgtctaggccagtaggatagagtatctatctg

SEQ ID NO: 348 - DNA, 121 bp, Homo sapiens
  source 1..121: mol_type = other DNA
gatacagaaacttgatttctgtctaggcatggtggctcatacctacaatcctggtgctttrggaggcggaggctggaagctcactcgagactaggagtttgagaccagcttgggcaatgta

SEQ ID NO: 349 - DNA, 121 bp, Homo sapiens
  source 1..121: mol_type = other DNA
atgatattcactttaaccaatattgaacgagaagctaccaatgcatttaaatgcccctagrcagtcttctggaaattgtaaagcatgatctttnatgctaagtgaaatgcctgcttctttt

SEQ ID NO: 350 - DNA, 121 bp, Homo sapiens
  source 1..121: mol_type = other DNA
ccctgctggagctcatgaggcccccgtggggaccctttcttccccagcacctatggtccgrctcctttgtgggttcctcttcctgctcctggcccttgcctctccatggcggcttcacaga

SEQ ID NO: 351 - DNA, 121 bp, Homo sapiens
  source 1..121: mol_type = other DNA
atgaactgaatagtgggagaatcaggtcggtaagggagcaaatacaatgtactttggggarttctgtgaggaggatatcgacagccttacagtccgacattcttcacaactatctgccaat

SEQ ID NO: 352 - DNA, 121 bp, Homo sapiens
  source 1..121: mol_type = other DNA
agcgctcaattcagtgaattttgtttatttacagagttgtacaaccaccaccacaaactarttttagaaaatttctatcactctcaaataggaagtacccatttacagcaaagaagaaaaa

SEQ ID NO: 353 - DNA, 121 bp, Homo sapiens
  source 1..121: mol_type = other DNA
aaaccaacatttgtatgtatcccttgcaagtgaaggggcaaccagcaaatatctaatcaamccctactatgtttaagacagtatcaatactcacggaagagggtaagatgcaaataaaaga

SEQ ID NO: 354 - DNA, 121 bp, Homo sapiens
  source 1..121: mol_type = other DNA
ctcagctacttcaaaatccccaataagatttataacaaagtgtttgacatgctcaagaacrtcatttattctttcaaatgaaattgtagttcccaattgatctaaaagcactctaacatca

SEQ ID NO: 355 - DNA, 121 bp, Homo sapiens
  source 1..121: mol_type = other DNA
accccacaggtcaancaggaggtctgagggagttcaggggagtccatctcttcttgaagcrtgtggggctggagatgagctctgactgttgctgatgcaaaaagacattgagccagaagtc

SEQ ID NO: 356 - DNA, 121 bp, Homo sapiens
  source 1..121: mol_type = other DNA
tctccagccccacangcttcaagaagagatggactcccctgaactccctcagacctcctgmttgacctgtggggttattttgttgtaatgcaacatttcaataacaccctttgctaatggt

SEQ ID NO: 357 - DNA, 121 bp, Homo sapiens
  source 1..121: mol_type = other DNA
aatcaccagcccctcacatatttgccacaaggaagagtcacaggagacactatggctcagragccacagcccctcccaccattgagtcttgaccacttccacctgtgccatctcctgtctc

SEQ ID NO: 358 - DNA, 121 bp, Homo sapiens
  source 1..121: mol_type = other DNA
ttctcctactgaatatttttatggtctttgaacccacagagaaaatgtccatcaagaaacmagtcaggctgggtanggtggttcacacctgtaatcccagcactttgggaggcnaaggnag

SEQ ID NO: 359 - DNA, 121 bp, Homo sapiens
  source 1..121: mol_type = other DNA
attttactgaacactgactctgcagcaggctctcaccccntcatctcattcatcttcccarcagcactggagggaggtatttgcatgcattcttgctttcacagaggctgagaaggagcct

SEQ ID NO: 360 - DNA, 121 bp, Homo sapiens
  source 1..121: mol_type = other DNA
atcacagacttcctcacatgggtaaaaagcaacataaagtgttctgggaggcagcatggcrctgcgggggagaagggtggactctggatccagagaactcggcttgcntcttatctccaag

SEQ ID NO: 361 - DNA, 121 bp, Homo sapiens
  source 1..121: mol_type = other DNA
gaggcagcatggcnctgcgggggagaagggtggactctggatccagagaactcggcttgcrtcttatctccaaggcttattagctgggtgaccttaggtaaccgaggaagctcaggtaanc

SEQ ID NO: 362 - DNA, 121 bp, Homo sapiens
  source 1..121: mol_type = other DNA
cntcttatctccaaggcttattagctgggtgaccttaggtaaccgaggaagctcaggtaamctctatggccaatatgatgcactcccatccctcggatggagagatgggagagactgtgct

SEQ ID NO: 363 - DNA, 121 bp, Homo sapiens
  source 1..121: mol_type = other DNA
tattttttagaccaatgagagagtgcctatttaaacaagaacacccgggtttacataaaartagtggtacaagtgtaagacagtcncaagtgtgtgtgcgtatgtgtgtgtgtggtgccct

SEQ ID NO: 364 - DNA, 121 bp, Homo sapiens
  source 1..121: mol_type = other DNA
attccctgtttaataaacaatgctctgtcaaagtagattcttggccaacaattatccgtgraaaggagccatagagaagtttgtcttggttttcagttttcctcccatggaaagatgctac

SEQ ID NO: 365 - DNA, 121 bp, Homo sapiens
  source 1..121: mol_type = other DNA
ttgtctttggaanttgctcaagttatgaatttttccagccagcattaactaaggtcacagmatggttacagagatatgagtggaagtagcatctttccatgggaggaaaactgaaaaccaa

SEQ ID NO: 366 - DNA, 121 bp, Homo sapiens
  source 1..121: mol_type = other DNA
cagagcgagactctgtctccnaaaaaaaaaanaaaagaaatgttctgatgttttgtgtttrtctggtgcttgttggcatttctggaggaagacattcagggagcccagaggcacctcgtgg

SEQ ID NO: 367 - DNA, 121 bp, Homo sapiens
  source 1..121: mol_type = other DNA
ggggctgtggagtgggatggagacaagctctgaaaggacacatgggagatctagatgtagraggtacacaagtagtaggataactcacaggatggatccactggaggttaagacatgtggt

SEQ ID NO: 368 - DNA, 121 bp, Homo sapiens
  source 1..121: mol_type = other DNA
ttccctcatttggctttgctattatacttcttagctccctaagaaccaggaataagtctamctcagaaccttgcttttcttttcttttcaataaaatgagactctctacttcaactacctg

SEQ ID NO: 369 - DNA, 121 bp, Homo sapiens
  source 1..121: mol_type = other DNA
gacatccattctcattataggtggtttgaaaaatggtaactttctgtgagatgtgccattrcaaacaggaatgttttcatgcaggtcacacagtctatttatattgtacctttgaattaga

SEQ ID NO: 370 - DNA, 121 bp, Homo sapiens
  source 1..121: mol_type = other DNA
atggtagggtagaggaaaatccattggggaaattgttcctttggtatttacttaatctgarnattttttaaatgcaattgtaactattgatgaaatgtgaatattgattgaaaaaagacgt

SEQ ID NO: 371 - DNA, 121 bp, Homo sapiens
  source 1..121: mol_type = other DNA
tcacagtcaaaagttgaaaacaactcaaatgtctggtgaatggacaaactgtggcatgttmatgcaatgaaatactacttagcaataaaaaggaataatctactaatacctaaancaacat

SEQ ID NO: 372 - DNA, 121 bp, Homo sapiens
  source 1..121: mol_type = other DNA
tagacaacaaacatttgttagttccaacaggaagtggtaagatgacatgtcagtgagtttsggctggtaattgaacactcaccaaaaaacaaggacttgggtgtagaagaacggaaacatt

SEQ ID NO: 373 - DNA, 121 bp, Homo sapiens
  source 1..121: mol_type = other DNA
tttcagcatttaaatttttttaaatcgtagactgttatagttggaataaaccttagaaatrcttttttccaaccctctccttcgtctagtgaagaaatggaagctcaggaagtgatacatt

SEQ ID NO: 374 - DNA, 121 bp, Homo sapiens
  source 1..121: mol_type = other DNA
cctggaatcaactgaaaggagtgtctgggctggagataaggggaggccaaggttgttatgragattaggtcttataggtggccgcacttagagatgacagatggcaagtgtttcctattcc

SEQ ID NO: 375 - DNA, 121 bp, Homo sapiens
  source 1..121: mol_type = other DNA
tacacctgagagctggaaatgttggtttgggttccggggcgtcctgcgccaagaggagggracgggccgccctatcgcagtgcgggaaccctacagatcccccggagacgggaggcctgga

SEQ ID NO: 376 - DNA, 121 bp, Homo sapiens
  source 1..121: mol_type = other DNA
cctgttgtcagaccaagctgcattattctgcgttatttgaagttgganaacctcaaaaccrtggcttaaatcactgaagatttattttgctcacgaatatgcaggttgactgggggctctg

SEQ ID NO: 377 - DNA, 121 bp, Homo sapiens
  source 1..121: mol_type = other DNA
tgagaaaggccangaaccagaggaggagacagaaacacaggccacagnggcgcgaggatgmaaggtcagggtgagctggtcctcaggttatttttaatattattgtcatattttcccttca

SEQ ID NO: 378 - DNA, 121 bp, Homo sapiens
  source 1..121: mol_type = other DNA
ttcatttgtaagtaatgaggagccactaagggttttgaagcacctggtgtaagggcagagracagcctggtggggaaagagaggagcagtggggagatgccaaggaagtgaggccctgttt

SEQ ID NO: 379 - DNA, 121 bp, Homo sapiens
  source 1..121: mol_type = other DNA
tccttcaatcaaatatttatgagctaaatttttaagggccagttcgtgggctaggacttgratccaggatacagaacatttctccagtctagttgtggatttttagaatccagatatcaac

SEQ ID NO: 380 - DNA, 121 bp, Homo sapiens
  source 1..121: mol_type = other DNA
gcacgatgctgacaagacaatgcctcccttccctgactgtaaggttgtccctactggtttrttcactttggaggcgcctggctccgtattcctcaggtactgctggatgaggctgtctgga

SEQ ID NO: 381 - DNA, 121 bp, Homo sapiens
  source 1..121: mol_type = other DNA
tcagagccagccgtgtgagaaccaggcctgggtctttgctaccctcgccaccactgtcctrtactgcctggtgtttctcctcagcctagtgggcaacagcctggtcctgtgggtcctggtg

SEQ ID NO: 382 - DNA, 121 bp, Homo sapiens
  source 1..121: mol_type = other DNA
caaacattttaaacttatgttttcctctaattgtaacagcctatatcaggagntcttaagmtttgctgcacatcagaaccacctggagggctagtaaatatgctgattcctgagctacctc

SEQ ID NO: 383 - DNA, 121 bp, Homo sapiens
  source 1..121: mol_type = other DNA
aagaaaaggacttagtgcccctgaattgtatacttaaaaacagagagagaggtgggaggargggagaagagtattctaggaggaagagactatgtgcaaaaagtattggaagcaggaatga

SEQ ID NO: 384 - DNA, 121 bp, Homo sapiens
  source 1..121: mol_type = other DNA
catcctgagacctaactacttctaggcatattagtaaatggaatgagtcttggaccagttrctccctatccctgttaatcaataataagtatatagatgatcatcctggaagctatctctg

SEQ ID NO: 385 - DNA, 121 bp, Homo sapiens
  source 1..121: mol_type = other DNA
aaccactgcaacccatctcctttaagtttttgtatttaatataattcagtagataattcartcagcccttacagtgctgccaaaatacctggggagctttttcaatggtatagatgtccgg

SEQ ID NO: 386 - DNA, 121 bp, Homo sapiens
  source 1..121: mol_type = other DNA
tgtccgggccgtactccagagatgctaatgcagttggtctggggtggggcctgggcacttrcttttttagatactcccctcgtgagtctgatggatagctaggtaaagaaccactccactg

SEQ ID NO: 387 - DNA, 121 bp, Homo sapiens
  source 1..121: mol_type = other DNA
ttttaaaaattttacttcatgcccatttttgtggctgggctggggggaggaggcaaattcratttgaacatatacttgtaattctaatgcaaaattatacaatttttcctgtaaacaatac

SEQ ID NO: 388 - DNA, 121 bp, Homo sapiens
  source 1..121: mol_type = other DNA
gtatcgttgaagttcctgctgaatgtccatttgatacattcggtctcgtgtatcttctagrgtctctcggaatttggccttcatgtgagccaaagatgctgaacttaaagcctcctgtaac

SEQ ID NO: 389 - DNA, 121 bp, Homo sapiens
  source 1..121: mol_type = other DNA
ccagctgccagccaggtgccacacatgcacaaatagctccccaagctgctccagcaccctrcttctgacaatggtttggcttcactgcatggccacagaactatgtcaaagggatcatgct

SEQ ID NO: 390 - DNA, 121 bp, Homo sapiens
  source 1..121: mol_type = other DNA
cagctggaaaagacaaaacctggatttgaatcccagtttgtctgcctgactttgcagtccrtgtacgtaagcacaatgttatatgctnaaatacctagcatggctctgtggagtgacacac

SEQ ID NO: 391 - DNA, 121 bp, Homo sapiens
  source 1..121: mol_type = other DNA
agggcaaagaattcacatgtctttcctgacaatctgttccttggcctgagtgaactgtccraggagaactgcacaggtgctgtcctgggaagataacgaaaggtggcagcacatgaccact

SEQ ID NO: 392 - DNA, 121 bp, Homo sapiens
  source 1..121: mol_type = other DNA
tgtcctgtgcttttctgatctctgtacgctgcagccctcttccctccaacaagaaaggcascatgcccagaagtacctgcctggatatcccctgacacagctcctgtgttctctctcagca

SEQ ID NO: 393 - DNA, 121 bp, Homo sapiens
  source 1..121: mol_type = other DNA
tgagctcgactgtcccaaagtgaacttggaaaatgttccccagggatggggacaaacatgraacttagcagggtaggagagaagggagagatctgagtgctggaggagcccaggccacagg

SEQ ID NO: 394 - DNA, 121 bp, Homo sapiens
  source 1..121: mol_type = other DNA
cccttcaaatgtagaggatatttcacaggtgtgtccccaccccaggcttctcttccttaarctaaacacccacgtcaccttctaagctggttttcagaccccacaagatcctttaatctgt

SEQ ID NO: 395 - DNA, 121 bp, Homo sapiens
  source 1..121: mol_type = other DNA
agctctgggagcaaccagggcatcaagggtttgtctcagccagtcgcgagcgtagagcttrgactgttggttggaactgagtgtccatgggcagtgggcaagtctcctggtcctcctctcc

SEQ ID NO: 396 - DNA, 121 bp, Homo sapiens
  source 1..121: mol_type = other DNA
ttaccaccactgcggagtcctgcctgggtcccatgacctgctggctagtgagggaaggagrggagaaaatgacctgaccaagagggaggcccagggctccctcaacacccactcagcggag

SEQ ID NO: 397 - DNA, 121 bp, Homo sapiens
  source 1..121: mol_type = other DNA
tacgatcaaggccacttgaattgtcttccccagtttcctggagtgagggatggggactgcrttcatggaagacaccatcaggctggtcgggtacagaagggctgcatgtgctccgggagtg

SEQ ID NO: 398 - DNA, 121 bp, Homo sapiens
  source 1..121: mol_type = other DNA
ctgaattaatgatgtgaacttgaagtttcaggtcttcaagtaatccctgggtgatgcatcrggattaggcctttgtagtagaaattatggacatgcgtgctgagctttttgtgtcttgcta

SEQ ID NO: 399 - DNA, 121 bp, Homo sapiens
  source 1..121: mol_type = other DNA
gaaagtctctcattaattataaaaatgatttaatctgctggaaatatttatttccagagarggaagtgtggtgtcccagctctgtaatgctatcaacgttatgtatgtgcagtaagtagaa

SEQ ID NO: 400 - DNA, 121 bp, Homo sapiens
  source 1..121: mol_type = other DNA
tgggcagaggcagcgagcgctggctgaagtttccggtgggaaatgggcagtgcctagaagrgaaggaaacgatgcatgagaaggttccagatgtctatgaggaacatgacgtgtcctgtcc

SEQ ID NO: 401 - DNA, 121 bp, Homo sapiens
  source 1..121: mol_type = other DNA
ccatccacagccccgacccacattctggagggatggtcgtacctctgtgaccagccctccrcaccgtcacataggccagcagggggcaatgccaggtgccatccagagcccacccccatgt

SEQ ID NO: 402 - DNA, 121 bp, Homo sapiens
  source 1..121: mol_type = other DNA
ccaggtgtggctcctgtctcacgtgcctgtgctggctgccccaacactgcgaggcggggamtggccttttacacgacgaaatgagagcactgtgacaaaaggtgttatacatggcaccacc

SEQ ID NO: 403 - DNA, 121 bp, Homo sapiens
  source 1..121: mol_type = other DNA
gcggcctcatggctgtgaatctgagtgcagaagaacagagtataagattcccaggcaagamaactgtacacgtatgatgaggtcaacacagaggtcacgtcaaacacaattctgccagaat

SEQ ID NO: 404 - DNA, 121 bp, Homo sapiens
  source 1..121: mol_type = other DNA
aacaaatatatgaagagagaaggaatcagaattatctcagtagtctccagtgatgggtaargagaggagtatgtaaaatgagcagcattagatataactgcgacaaagggccactcacgtt

SEQ ID NO: 405 - DNA, 121 bp, Homo sapiens
  source 1..121: mol_type = other DNA
tttcatttgtttgttttaagacaaagtctcgctctgtcactcaggccgaagagcattggtrcgatcttggctcactgcaacctctgccttctgagtcgaccctattctcctgccccagcct

SEQ ID NO: 406 - DNA, 121 bp, Homo sapiens
  source 1..121: mol_type = other DNA
cagcaaacacaggtgaagcatcaaacaaaagcaggggtggggtggccaggactcctcaatractgttttaaaattagacccaacctgataagcctgcttgggatgatctgtcagtgagcct

SEQ ID NO: 407 - DNA, 121 bp, Homo sapiens
  source 1..121: mol_type = other DNA
acaaacacttgtgcaaatgtgtagcagatctagacccaaagacttagggtcaatgaaatcmagacattttggtagtgattggaaatccatatttacttggggtgcaagagtcaaaggataa

SEQ ID NO: 408 - DNA, 121 bp, Homo sapiens
  source 1..121: mol_type = other DNA
ctccaaataaagtctacaatctgtaatatggcctacaaggcccacctctccctccaaactraaaaatctggtctcagcttacttttccaatctccccatcacactccacattgccccccag

SEQ ID NO: 409 - DNA, 121 bp, Homo sapiens
  source 1..121: mol_type = other DNA
tctgatgtgagggtttacccatcttgtcctctccagccccaagcctcattactctcacccrcattatatcatccaccccacctgacctcccagcttccagcctcccgtcctctgcagaact

SEQ ID NO: 410 - DNA, 121 bp, Homo sapiens
  source 1..121: mol_type = other DNA
tgtgttatctctaagaattctctgtctaccgcaaggtctttaagatattttctcttaggasggggtggatttttgagctagggtttggataagctgcttttgagaagccagcagattggtg

SEQ ID NO: 411 - DNA, 121 bp, Homo sapiens
  source 1..121: mol_type = other DNA
agacagggcctgtaggctcggacacgacccggtcctgattttaacagtagacttgagaagscangctcagcagacaggctgctggaggatccacccgctgtctcccgcagcggccccactg

SEQ ID NO: 412 - DNA, 121 bp, Homo sapiens
  source 1..121: mol_type = other DNA
aagtgctaagattacaggcgtgagccatggcacgtggcctgtaactatgattttgatgaasagttataggccaatgatgtcagaatttctatttcaaatctgggtcttgcccctggagctc

SEQ ID NO: 413 - DNA, 121 bp, Homo sapiens
  source 1..121: mol_type = other DNA
agtcagacagtctcaaattaaaaacacaagtgagtggtggaacagggctatatgtataagrcctactccagcacagtcataatttagcgatataaagcatgcactgcacctagcacagtgc

SEQ ID NO: 414 - DNA, 121 bp, Homo sapiens
  source 1..121: mol_type = other DNA
accatctttttcctgaacaactgcaacagctcctgactggcatccctgcttccttgcaccrcccctaacccccagccaccacccttcttctnctgggggctttagagatctttaaaacatg

SEQ ID NO: 415 - DNA, 121 bp, Homo sapiens
  source 1..121: mol_type = other DNA
agacgagattacgccgctgcactccagcctgggtgacgagagactctgcctcaaaaaaatwaaaaaatgaaacagccagtgaggaggaaggctccccgccttccccccgccggaacatagc

SEQ ID NO: 416 - DNA, 121 bp, Homo sapiens
  source 1..121: mol_type = other DNA
taatagaaactcccgtctctgagcctgcatncagggttcnttctnctttatngtcctgggrtttgctgctttaggcatgaggggaggctcaaaagcaaatcatccatttttcataaccaat

SEQ ID NO: 417 - DNA, 121 bp, Homo sapiens
  source 1..121: mol_type = other DNA
gtaagggagcttgttaaacaaacataacatcaatagcagcatctggcaatgattcacagaraccactgcaaatgaaacaacancactcaacagagtgcatgcagnaagcactcagtaagaa

SEQ ID NO: 418 - DNA, 121 bp, Homo sapiens
  source 1..121: mol_type = other DNA
taacttaaatttaaangtcaacagccacatgtggctactagctaccntatcagatggtgcrgtaatagaaactaaaaaggtgggccattccctcattttcattcatgacaatcatctggtt

SEQ ID NO: 419 - DNA, 121 bp, Homo sapiens
  source 1..121: mol_type = other DNA
attctgcaccacccaatatggcagccaccagtccgcatgtggctactgagtgcttgaaacrtggctcatctgttgaagaactaaagtttaatttcctttagttttaattaacttaaattta

SEQ ID NO: 420 - DNA, 121 bp, Homo sapiens
  source 1..121: mol_type = other DNA
aagcttctaactgggccagttctttactcgtccataaggaagnagattcacggagaagcarataggaacttgcactaattagacaccgtatctgaattcttctactgaaagcctccagttt

SEQ ID NO: 421 - DNA, 121 bp, Homo sapiens
  source 1..121: mol_type = other DNA
agaagaattcagatacggtgtctaattagtgcaagttcctatntgcttctccgtgaatctrcttccttatggacgagtaaagaactggcccagttagaagcttccttgcacaattctttac

SEQ ID NO: 422 - DNA, 121 bp, Homo sapiens
  source 1..121: mol_type = other DNA
tactattgtccaactatacaagcccattatcattttcttaaagaaaactgtcatttatacmtgtgggtctttttaatgtcctcatttctttctaccatggaatgaaacattttcttggtga

SEQ ID NO: 423 - DNA, 121 bp, Homo sapiens
  source 1..121: mol_type = other DNA
cagatatttgccaggctatgcttgaaatgataaactatctctttgtttaagattctcaacmgttccatcagtctgtttgatattctttctataaccacagacaaaattagaggatgagttc

SEQ ID NO: 424 - DNA, 121 bp, Homo sapiens
  source 1..121: mol_type = other DNA
ggagagcctagaggggcccccctcagctcctaacgagccccccttctgagttgagtccccrtgaccttcagcctttagcctagttgctgggaagggggacagggcccatgagagcccaggg

SEQ ID NO: 425 - DNA, 121 bp, Homo sapiens
  source 1..121: mol_type = other DNA
actccatggctatttagcagtcactccccattcccacattccacagttttggcaaccaacrgttggtgatttctttctgtctttgtagatttacctatgctggatatttcatttcagtgga

SEQ ID NO: 426 - DNA, 121 bp, Homo sapiens
  source 1..121: mol_type = other DNA
tctagagcagagatccccatggaactgggacagaggcagcggccttccaggcagcagaacrtgccatgagtgcaggggctgcagggcggggacctggcaggtggtacaagtgaggggatcc

SEQ ID NO: 427 - DNA, 121 bp, Homo sapiens
  source 1..121: mol_type = other DNA
tccctgaccagggctctttctcatgggtgcattgccaggggcaagaaagtgggagtctgtrttcctcaggacagaggagtttcagctcaagaagtgcctggctgtccagcttgacactgtc

SEQ ID NO: 428 - DNA, 121 bp, Homo sapiens
  source 1..121: mol_type = other DNA
aagagggaaaagagaaagaatggcaagtgagccctccaatgacgcacacccaaatgctccmgcctggggtctcacaggagctgagaaccgaagaagtgattgtccttggtaaggggaagag

SEQ ID NO: 429 - DNA, 121 bp, Homo sapiens
  source 1..121: mol_type = other DNA
cttggaaaatttagagtgagtgctatgcctgctctgggttacttctggagaatggcagtartcatgcattctatttttattcaaatgctcacatagaatacactgagtcaggtaaaagcac

SEQ ID NO: 430 - DNA, 121 bp, Homo sapiens
  source 1..121: mol_type = other DNA
tgcngcccctgtgacacccacaccaggctgctgcacagacctgcngggcctggagctcagrgtgcagaggaatgctgaggagctgggccatgaggccttctgggagcaagagctgcgccgg

SEQ ID NO: 431 - DNA, 121 bp, Homo sapiens
  source 1..121: mol_type = other DNA
gccataccacctagctacctctccctaattttccttcctttattttggtagcactgggtargaaatcacagcctagaatgaaggtttctatgaacttggctcccaaaaatttggtatatat

SEQ ID NO: 432 - DNA, 121 bp, Homo sapiens
  source 1..121: mol_type = other DNA
tttaaataaccccagtttgtacactcagaaaaatggcttaaatgacttgcctaaaattatrtaggtagcaaacaatatttgactcaaaagctnctacttttaactggattttagtcttagt

SEQ ID NO: 433 - DNA, 121 bp, Homo sapiens
  source 1..121: mol_type = other DNA
atttacgaagcatgaaaaaatattctatccattagtaatcaaagaaaggcaaggagggccmcttttgtagaaagattgcttcctgcctgtaatcccagcactttgggaggctgaggtgagc

SEQ ID NO: 434 - DNA, 121 bp, Homo sapiens
  source 1..121: mol_type = other DNA
tgtccatttcagatgtgagagctctgaactcgacagagataacttgctgcttggcacccamtcagcccctgcagctcctgtcacttaatggtccaaccctctttgccagcaaaatgtctgg

SEQ ID NO: 435 - DNA, 121 bp, Homo sapiens
  source 1..121: mol_type = other DNA
aaaaagtaaagaaacaaacatttagcaaacatgaaagaattccatatntttaccatgacgrtgatttacacatgcacattattaattgacttataaacatagtaagttccttaaaagggga

SEQ ID NO: 436 - DNA, 121 bp, Homo sapiens
  source 1..121: mol_type = other DNA
tcagagtgctaggaatctttctagcaagttattaaacctgagggtcgccttaggaactcaraaacttacagttggtgtcagaaatgaacatggtcttgggatcttcctaactttacaccaa

SEQ ID NO: 437 - DNA, 121 bp, Homo sapiens
  source 1..121: mol_type = other DNA
ttatttctgttaggtctccttatgctcactttaccagggagactttcccttattattccaratgcactgctttccctgcccttcttcctccctcctactcctagccctccatagaccagtc

SEQ ID NO: 438 - DNA, 121 bp, Homo sapiens
  source 1..121: mol_type = other DNA
caaggagactgctgcctgcctcatgcagggagacctttcccaaagcttggcacctgccctrtgctggcccagtggaggccaaatgggggagcagaaaggaagacattgctaaagttctctt

SEQ ID NO: 439 - DNA, 115 bp, Homo sapiens
  source 1..115: mol_type = other DNA
ggctcctgagaaatagaaaagtttaatgaagcaactctcaggagctgctttcatratagaacttgaagatactggaactcaggtctgctaaataccagttcagtgttcttgccct

SEQ ID NO: 440 - protein, 712 aa, Homo sapiens
MENLGVGEGAEACSRLSRSRGRHSMTRAPKHLWRQPRRPIRIQQRFYSDPDKSAGCRERDLSPRPELRKSRLSWPVSSCRRFDLENGLSCGRRALDPQSSPGLGRIMQAPVPHSQRRESFLYRSDSDYELSPKAMSRNSSVASDLHGEDMIVTPFAQVLASLRTVRSNVAALARQQCLGAAKQGPVGNPSSSNQLPPAEDTGQKLALETLDELDWCLDQLETLQTRHSVGEMASNKFKRILNRELTHLSETSRSGNQVSEYISRTFLDQQTEVELPKVTAEEAPQPMSRISGLHGLCHSASLSSATVPRFGVQTDQEEQLAKELEDTNKWGLDVFKVAELSGNRPLTAIIFSIFQERDLLKTFQIPADTLATYLLMLEGHYHANVAYHNSLHAADVAQSTHVLLATPALEAVFTDLEILAALFASAIHDVDHPGVSNQFLINTNSELALMYNDASVLENHHLAVGFKLLQAENCDIFQNLSAKQRLSLRRMVIDMVLATDMSKHMNLLADLKTMVETKKVTSLGVLLLDNYSDRIQVLQNLVHCADLSNPTKPLPLYRQWTDRIMAEFFQQGDRERESGLDISPMCDKHTASVEKSQVGFIDYIAHPLWETWADLVHPDAQDLLDTLEDNREWYQSKIPRSPSDLTNPERDGPDRFQFELTLEEAEEEDEEEEEEGEETALAKEALELPDTELLSPEAGPDPGDLPLDNQRT

SEQ ID NO: 441 - protein, 712 aa, Homo sapiens; identical to SEQ ID NO: 440

SEQ ID NO: 442 - protein, 1080 aa, Homo sapiens
MPAKGRYFLNEGEEGPDQDALYEKYQLTSQHGPLLLTLLLVAATACVALIIIAFSQGDPSRHQAILGMAFLVLAVFAALSVLMYVECLLRRWLRALALLTWACLVALGYVLVFDAWTKAACAWEQVPFFLFIVFVVYTLLPFSMRGAVAVGAVSTASHLLVLGSLMGGFTTPSVRVGLQLLANAVIFLCGNLTGAFHKHQMQDASRDLFTYTVKCIQIRRKLRIEKRQQENLLLSVLPAHISMGMKLAIIERLKEHGDRRCMPDNNFHSLYVKRHQNVSILYADIVGFTQLASDCSPKELVVVLNELFGKFDQIAKANECMRIKILGDCYYCVSGLPVSLPTHARNCVKMGLDMCQAIKQVREATGVDINMRVGIHSGNVLCGVIGLRKWQYDVWSHDVSLANRMEAAGVPGRVHITEATLKHLDKAYEVEDGHGQQRDPYLKEMNIRTYLVIDPRSQQPPPPSQHLPRPKGDAALKMRASVRMTRYLESWGAARPFAHLNHRESVSSGETHVPNGRRPKSVPQRHRRTPDRSMSPKGRSEDDSYDDEMLSAIEGLSSTRPCCSKSDDFYTFGSIFLEKGFEREYRLAPIPRARHDFACASLIFVCILLVHVLLMPRTAALGVSFGLVACVLGLVLGLCFATKFSRCCPARGTLCTISERVETQPLLRLTLAVLTIGSLLTVAIINLPLMPFQVPELPVGNETGLLAASSKTRALCEPLPYYTCSCVLGFIACSVFLRMSLEPKVVLLTVALVAYLVLFNLSPCWQWDCCGQGLGNLTKPNGTTSGTPSCSWKDLKTMTNFYLVLFYITLLTLSRQIDYYCRLDCLWKKKFKKEHEEFETMENVNRLLLENVLPAHVAAHFIGDKLNEDWYHQSYDCVCVMFASVPDFKVFYTECDVNKEGLECLRLLNEIIADFDELLLKPKFSGVEKIKTIGSTYMAAAGLSVASGHENQELERQHAHIGVMVEFSIALMSKLDGINRHSFNSFRLRVGINHGPVIAGVIGARKPQYDIWGNTVNVASRMESTGELGKIQVTEETCTILQGLGYSCECRGLINVKGKGELRTYFVCTDTAKFQGLGLN

SEQ ID NO: 443 - DNA, 6154 bp, Homo sapiens
  source 1..6154: mol_type = other DNA
agctgaggaactgcgtgtggagtcagcccagtctggatgcacaggaggatgctggcggcacagtgagtgaggcctggtgccagagctgtgcggaccccttgttggccatggagcagcaggcccagaggccctctccccagccctgcttgcctgcctcggagaggacagaggcctaggcccacgggggagggtgttggcagacagatgccctccaggccctggggcctccttaacggccccttaacgacacgcgtgccaagggtggaggatgccagccaaggggcgctacttcctcaacgagggcgaggagggccctgaccaagatgcgctctacgagaagtaccagctcaccagccagcatgggccgctgctgctcacgctcctgctggtggccgccactgcctgcgtggccctcatcatcattgccttcagccagggggacccctccagacaccaggccattctgggcatggcgttcctggtgctggcggtgtttgcggccctctctgtgctgatgtacgtcgagtgtctcctgcggcgctggctcagggccttggcgctgctcacctgggcctgcttggtggcgctgggctatgtgctggtgttcgacgcatggacaaaggcggcctgtgcgtgggagcaggtgcccttcttcctgttcattgtcttcgtggtgtacacactactgcccttcagcatgcggggcgctgtcgccgttggggccgtctccactgcctcccacctcctggtgctcggttctttgatgggaggcttcacgacacccagtgtccgggtggggctgcagctgctggccaacgcagtcatcttcctgtgtgggaacctgacaggcgccttccacaagcaccaaatgcaggatgcgtcccgggacctcttcacctacactgtgaagtgcatccagatccgccggaagctgcgcatcgagaagcgccagcaggagaacctgctgctgtcagtgcttccggcccacatctccatgggcatgaagctggccatcatcgaacggctcaaggagcatggtgaccgtcgctgcatgcctgacaacaacttccacagcctctacgtcaagaggcaccagaatgtcagcatcctctatgcggacatcgtgggcttcacgcagctggccagcgactgttctcccaaggagctggtggtggtgctgaatgagctctttggcaagttcgaccagatcgccaaggccaacgagtgcatgcgaatcaagatcctcggcgactgctactactgtgtatcgggcctgcccgtgtcgctgcctacccacgcccggaactgcgtgaagatggggctggacatgtgccaggccatcaagcaggtgcgggaggccacgggcgtggacatcaacatgcgtgtgggcatacactcggggaatgtgctgtgcggggtcatcgggctgcgcaagtggcagtatgacgtgtggtcccacgacgtgtccctggccaaccggatggaggcagccggagtacccggccgggtgcacatcacggaggccacgctaaagcacctggacaaggcgtacgaggtggaggatgggcacgggcagcagcgggacccctacctcaaggagatgaacatccgcacctacctggtcatcgacccccggagccagcagccacccccgcccagccaacacctccccaggcccaagggggacgcggccctgaagatgcgggcgtcagtgcgcatgacccggtacctcgagtcctggggggcggcacggccctttgcacatctcaaccaccgtgagagcgtgagcagtggtgagacccacgtccccaacgggcggaggcctaagagcgttccccagcgccaccgccggaccccagacagaagcatgtcccccaaggggcggtcggaggatgactcgtacgatgacgagatgctgtcagccattgaggggctcagctccacgaggccctgctgctccaagtccgatgacttctacacctttgggtccatcttcctggagaagggctttgagcgcgagtaccgcctggcacccatcccccgggcccgccacgactttgcctgcgccagcctgatcttcgtctgcatcctgctcgtccatgtcctgctcatgcccaggacggcggcactgggtgtgtccttcgggctggtggcctgtgtactggggctggtgctgggcctgtgctttgccaccaagttctcgaggtgctgcccagctcgggggacgctctgcactatctctgagagggtggagacacagcccctgctgaggctgaccctggccgtcctgaccatcggcagcctgctcactgtggccatcatcaacctgcccctgatgcctttccaagttccagagctgcctgttggcaatgagacaggcctactggccgcgagcagcaagacaagagccctgtgtgagcccctcccgtactacacctgcagctgtgtcctgggcttcatcgcctgctcggtcttcctgaggatgagcctggagccaaaggttgtgctgctgacagtggccctggtggcctacctggtgctcttcaacctctccccatgctggcagtgggactgctgcggccaaggcctgggcaacctcaccaagcccaacggcaccaccagtggcacccctagctgttcctggaaggacctgaagaccatgaccaatttctacctggtcctgttctacatcaccctgcttacactctccagacagattgactattactgccgcttggactgcctatggaagaagaagttcaagaaggagcacgaggagtttgagaccatggagaacgtgaaccgccttcttctggagaacgtcctgccagcccacgtggctgcccactttatcggtgacaagttaaacgaggactggtaccatcagtcctatgactgcgtctgtgtcatgtttgcctccgtgccggacttcaaagtgttctacacagagtgcgatgtcaacaaagaagggctggagtgcctacgcctgctcaatgagatcattgccgacttcgacgagctcctactgaagcccaagttcagcggcgtggagaagatcaagaccatcggcagcacgtacatggcagctgcagggctcagcgtcgcctcagggcacgagaaccaggagctggagcggcagcatgcccacattggtgtcatggtggagttcagcatcgccctgatgagtaagctggacggcatcaacaggcactccttcaactccttccgcctccgcgtcggcataaaccatgggcctgtgattgctggagtgattggggcccgaaaacctcagtatgacatctggggaaacactgtcaatgtggccagccgaatggaaagcactggagaacttgggaaaatccaggttaccgaggagacctgcaccatcctccagggcctcgggtactcttgtgaatgccgtggcctgatcaacgtcaaaggcaaaggcgagctgaggacttactttgtctgtacggacactgccaagtttcaggggctggggctgaactgagggctcctgctggattccgaaaaggccgggaagccagtctccttccctgaagcaagcccaggagaagactctccgccccacgccaatcccaaaggcatgcagatggctgtgcatgttggcttctttggacctgcactggaggatttctcagacacatgcaccagattctggctcgaagcagccactgagccataatgcgcaggggaggccagaagctctgtgcctggtctgtaacagtttccaggccagctggagaatgttcactggttcggggctgactttgagatctttgttccctgaggtgccaggcaggcaactttagcacatgatgaaaacagacttccacctcagtggcctgtgggcacgcacaagtgaggtctgtttttctagacaccaagggggagtaagctgagctgtctagcacggattggagactccctctccctggtgggcctggcaatgacagcatttctcacagaggcattctggtaaatgaagctgaaaggggtgttttacatctgtaaacggtttcaaacaggtagagagaaaaacaccacaattaacactgttactttttgccttgtctggcatgtttgttttaaatgaatacattaatggggtttttatccttttgaatgacttttcagacactagacataaatctcttccctccagtgtatgctctgcctttttaaccactgacatgtaaggaggactactgtctagcatcagcttatggggtcagctggctgtggggatagagtcctgaggaatgtggtcacagcaagaaggcggggagcagcagagccttgcctttgaatgaggcagcttgtgaggcaagcattctggagagaggtgctttgaaagtaaggtgcggcctttcacctcttccttgattactcacacatctttgcgttctcccctgccgtccttcaactgtatcttacttttcttaccagaaaggaatggagtctgtttagagacaacttggacaacctgtgagtgcatctcttctttcctttagtcttcacagctaactctggagagcttcaaaactagaaggatctactccgcatgggtgcatgcagaggctcctggatctgggaagcccgccccctcacaaatgctgagccgttcttgctctgaaactgcgtgagtcaaggcaaatgcaaaaagccaggttttggggatgtgtcttactgtgcttcaacttcccaaggaattgaaagtcaacctaactgtaacaacagggtgagaaatgaccaaactgcccgtgactttttctgaatggacttcataaccggaagacttaaccggtggcctcatcaccagagcatcgccaggatttctaatgcactcagtttccctacatagcagggattcttagctaggtgtccccatgaaccccgtaaagttctacacaaagtcttgcatacaggagcctttacaagatgattatacagggttgcagattgggtgactgaccagacttgttggggtcctgggatgagttgccccgggctgcaaattaagagtacagctaagtgcgggggtggcggtggagggaacgaaaattgaacctgtctgcctgtgctgtgtcgtgtggctttatcagcccgaggaagggcaggtgtattctaatttgcacaaaggtgctgggtagactagtggcagctctcatgtgctgcacataagtggaatcagtatgaatagaagaacttgctgtataaaggaatttcatggcaacaatgctggtaagggcaattagcctcgcttaagttgccttttttacacaccaaaactttttacatgaagggctggtttcacatgaatactatactgaaatctgtgctctcaagatctagcagtgaccagggctgcccggcgggggctctcctggcaagtcaggaaggtttctgttgctaatataacatagaaacacattagtgcactgggcctctctgaggtcagcatatttgtactcttggaatatttgtttttttcttcagtaacaacagaaaccccagttgggagtttaacaaataactgactaccactcactcatgcatttttatttccaattaaagcaaagcactgtgctgtgctcagataataatagtttgtaagtaaaagtttttagttttcagtgttcaggttatagaatataactgaccataaaaattacctgcaggtattttctttttatgaacttgtttttaaattaccaagtaattactggtgtcattttgttttatgacagacacacgtatctaacaaacaaacaaacagtgaccttctccatgggtcaaggacttccttacaatttctcctgagttaacttttgtgaaaataatacctaaggttttctggcttattgaggaaatttcctaacaaacaaacaaacaaacaaacagaagagaagatcattaaccactgtatactttgtgtatataataggtcagtgtaaagaaatatgatttgaggtggtgcatgcaagtaactagggtttattctatataatgaatatttatagatctgtaacatttgtttcaaaatgctgtttcatttttataaagtaccagtgtttagctgctttttatacattaaattagcaatttgaaaaactcaaaaaaaaaaaaaaaa

SEQ ID NO: 444 - protein, 734 aa, Homo sapiens
MPAKGRYFLNEGEEGPDQDALYEKYQLTSQHGPLLLTLLLVAATACVALIIIAFSQGDPSRHQAILGMAFLVLAVFAALSVLMYVECLLRRWLRALALLTWACLVALGYVLVFDAWTKAACAWEQVPFFLFIVFVVYTLLPFSMRGAVAVGAVSTASHLLVLGSLMGGFTTPSVRVGLQLLANAVIFLCGNLTGAFHKHQMQDASRDLFTYTVKCIQIRRKLRIEKRQQENLLLSVLPAHISMGMKLAIIERLKEHGDRRCMPDNNFHSLYVKRHQNVSILYADIVGFTQLASDCSPKELVVVLNELFGKFDQIAKANECMRIKILGDCYYCVSGLPVSLPTHARNCVKMGLDMCQAIKQVREATGVDINMRVGIHSGNVLCGVIGLRKWQYDVWSHDVSLANRMEAAGVPGRVHITEATLKHLDKAYEVEDGHGQQRDPYLKEMNIRTYLVIDPRSQQPPPPSQHLPRPKGDAALKMRASVRMTRYLESWGAARPFAHLNHRESVSSGETHVPNGRRPKSVPQRHRRTPDRSMSPKGRSEDDSYDDEMLSAIEGLSSTRPCCSKSDDFYTFGSIFLEKGFEREYRLAPIPRARHDFACASLIFVCILLVHVLLMPRTAALGVSFGLVACVLGLVLGLCFATKFSRCCPARGTLCTISERVETQPLLRLTLAVLTIGSLLTVAIINLPLMPFQVPELPVGNETGLLAASSKTRALCEPLPHLHTVFSRLNELTS

SEQ ID NO: 445 - DNA, 2582 bp, Homo sapiens
  source 1..2582: mol_type = other DNA
agatgtgactcactctcattaggtagcgtggaaggagccttcggatggagctgaggaactgcgtgtggagtcagcccagtctggatgcacaggaggatgctggcggcacagtgagtgaggcctggtgccagagctgtgcggaccccttgttggccatggagcagcaggcccagaggccctctccccagccctgcttgcctgcctcggagaggacagaggcctaggcccacgggggagggtgttggcagacagatgccctccaggccctggggcctccttaacggccccttaacgacacgcgtgccaagggtggaggatgccagccaaggggcgctacttcctcaacgagggcgaggagggccctgaccaagatgcgctctacgagaagtaccagctcaccagccagcatgggccgctgctgctcacgctcctgctggtggccgccactgcctgcgtggccctcatcatcattgccttcagccagggggacccctccagacaccaggccattctgggcatggcgttcctggtgctggcggtgtttgcggccctctctgtgctgatgtacgtcgagtgtctcctgcggcgctggctcagggccttggcgctgctcacctgggcctgcttggtggcgctgggctatgtgctggtgttcgacgcatggacaaaggcggcctgtgcgtgggagcaggtgcccttcttcctgttcattgtcttcgtggtgtacacactactgcccttcagcatgcggggcgctgtcgccgttggggccgtctccactgcctcccacctcctggtgctcggttctttgatgggaggcttcacgacacccagtgtccgggtggggctgcagctgctggccaacgcagtcatcttcctgtgtgggaacctgacaggcgccttccacaagcaccaaatgcaggatgcgtcccgggacctcttcacctacactgtgaagtgcatccagatccgccggaagctgcgcatcgagaagcgccagcaggagaacctgctgctgtcagtgcttccggcccacatctccatgggcatgaagctggccatcatcgaacggctcaaggagcatggtgaccgtcgctgcatgcctgacaacaacttccacagcctctacgtcaagaggcaccagaatgtcagcatcctctatgcggacatcgtgggcttcacgcagctggccagcgactgttctcccaaggagctggtggtggtgctgaatgagctctttggcaagttcgaccagatcgccaaggccaacgagtgcatgcgaatcaagatcctcggcgactgctactactgtgtatcgggcctgcccgtgtcgctgcctacccacgcccggaactgcgtgaagatggggctggacatgtgccaggccatcaagcaggtgcgggaggccacgggcgtggacatcaacatgcgtgtgggcatacactcggggaatgtgctgtgcggggtcatcgggctgcgcaagtggcagtatgacgtgtggtcccacgacgtgtccctggccaaccggatggaggcagccggagtacccggccgggtgcacatcacggaggccacgctaaagcacctggacaaggcgtacgaggtggaggatgggcacgggcagcagcgggacccctacctcaaggagatgaacatccgcacctacctggtcatcgacccccggagccagcagccacccccgcccagccaacacctccccaggcccaagggggacgcggccctgaagatgcgggcgtcagtgcgcatgacccggtacctcgagtcctggggggcggcacggccctttgcacatctcaaccaccgtgagagcgtgagcagtggtgagacccacgtccccaacgggcggaggcctaagagcgttccccagcgccaccgccggaccccagacagaagcatgtcccccaaggggcggtcggaggatgactcgtacgatgacgagatgctgtcagccattgaggggctcagctccacgaggccctgctgctccaagtccgatgacttctacacctttgggtccatcttcctggagaagggctttgagcgcgagtaccgcctggcacccatcccccgggcccgccacgactttgcctgcgccagcctgatcttcgtctgcatcctgctcgtccatgtcctgctcatgcccaggacggcggcactgggtgtgtccttcgggctggtggcctgtgtactggggctggtgctgggcctgtgctttgccaccaagttctcgaggtgctgcccagctcgggggacgctctgcactatctctgagagggtggagacacagcccctgctgaggctgaccctggccgtcctgaccatcggcagcctgctcactgtggccatcatcaacctgcccctgatgcctttccaagttccagagctgcctgttggcaatgagacaggcctactggccgcgagcagcaagacaagagccctgtgtgagcccctcccgcacctgcatactgttttttcccgtttaaatgagctcacttcataagaaataaaactacagtgaaaacaacactggaaaaaaaaaaaaaaaaaaaaaaaaaaaaaaa

SEQ ID NO: 446 - protein, 116 aa, Homo sapiens
QVQLVQSGAEVKKPGASVKVSCKVSGYTFTDYYITWVRQAPGQALEWMGWIYPGSGNTKYSQKFQGRFVFSVDTSASTAYLQISSLKAEDTAVYYCANYGNYWFAYWGQGTLVTVS

SEQ ID NO: 447 - protein, 111 aa, Homo sapiens
EIVLTQSPDSLAVSLGERATINCKASQSVDFDGDSYLNWYQQKPGQPPKVLIYAASTLQSGVPSRFSGSGSGTDFTLTINSLEAEDAATYYCQQSNEDPWTFGGGTKVEIK

SEQ ID NO: 448 - protein, 483 aa, Homo sapiens
MFCSTSAVNSCARCFFHSVCPAGMIVKFPGTAQKNTVCEPASPGVSPACASPENCKEPSSGTIPQAKPTPVSPATSSASTMPVRGGTRLAQEAASKLTRAPDSPSSVGRPSSDPGLSPTQPCPEGSGDCRKQCEPDYYLDEAGRCTACVSCSRDDLVEKTPCAWNSSRTCECRPGMICATSATNSCARCVPYPICAAETVTKPQDMAEKDTTFEAPPLGTQPDCNPTPENGEAPASTSPTQSLLVDSQASKTLPIPTSAPVALSSTGKPVLDAGPVLFWVILVLVVVVGSSAFLLCHRRACRKRIRQKLHLCYPVQTSQPKLELVDSRPRRSSTLRSGASVTEPVAEERGLMSQPLMETCHSVGAAYLESLPLQDASPAGGPSSPRDLPEPRVSTEHTNNKIEKIYIMKADTVIVGTVKAELPEGRGLAGPAEPELEEELEADHTPHYPEQETEPPLGSCSDVMLSVEEEGKEDPLPTAASGK

SEQ ID NO: 449 - protein, 595 aa, Homo sapiens
MRVLLAALGLLFLGALRAFPQDRPFEDTCHGNPSHYYDKAVRRCCYRCPMGLFPTQQCPQRPTDCRKQCEPDYYLDEADRCTACVTCSRDDLVEKTPCAWNSSRVCECRPGMFCSTSAVNSCARCFFHSVCPAGMIVKFPGTAQKNTVCEPASPGVSPACASPENCKEPSSGTIPQAKPTPVSPATSSASTMPVRGGTRLAQEAASKLTRAPDSPSSVGRPSSDPGLSPTQPCPEGSGDCRKQCEPDYYLDEAGRCTACVSCSRDDLVEKTPCAWNSSRTCECRPGMICATSATNSCARCVPYPICAAETVTKPQDMAEKDTTFEAPPLGTQPDCNPTPENGEAPASTSPTQSLLVDSQASKTLPIPTSAPVALSSTGKPVLDAGPVLFWVILVLVVVVGSSAFLLCHRRACRKRIRQKLHLCYPVQTSQPKLELVDSRPRRSSTQLRSGASVTEPVAEERGLMSQPLMETCHSVGAAYLESLPLQDASPAGGPSSPRDLPEPRVSTEHTNNKIEKIYIMKADTVIVGTVKAELPEGRGLAGPAEPELEEELEADHTPHYPEQETEPPLGSCSDVMLSVEEEGKEDPLPTAASGK

SEQ ID NO: 450 - protein, 192 aa, Homo sapiens
MQLTKGRLHFSHPLSHTKHISPFVTDAPLRADGDKPRAHLTVVRQTPTQHFKNQFPALHWEHELGLAFTKNRMNYTNKFLLIPESGDYFIYSQVTFRGMTSECSEIRQAGRPNKPDSITVVITKVTDSYPEPTQLLMGTKSVCEVGSNWFQPIYLGAMFSLQEGDKLMVNVSDISLVDYTKEDKTFFGAFLL

SEQ ID NO: 451 - protein, 251 aa, Homo sapiens
MAEDLGLSFGETASVEMLPEHGSCRPKARSSSARWALTCCLVLLPFLAGLTTYLLVSQLRAQGEACVQFQALKGQEFAPSHQQVYAPLRADGDKPRAHLTVVRQTPTQHFKNQFPALHWEHELGLAFTKNRMNYTNKFLLIPESGDYFIYSQVTFRGMTSECSEIRQAGRPNKPDSITVVITKVTDSYPEPTQLLMGTKSVCEVGSNWFQPIYLGAMFSLQEGDKLMVNVSDISLVDYTKEDKTFFGAFLL

SEQ ID NO: 452 - protein, 1080 aa, Homo sapiens; identical to SEQ ID NO: 442

SEQ ID NO: 453 - protein, 734 aa, Homo sapiens; identical to SEQ ID NO: 444

SEQ ID NO: 454 - protein, 593 aa, Homo sapiens [sequence omitted]

SEQ ID NO: 455 - DNA, 6139 bp, Homo sapiens
  source 1..6139: mol_type = other DNA
gaagggcgggggcggaggaggagcgagccgggccggggggcagctgcacagtctccgggatccccaggcctggaggggggtctgtgcgcggccggctggctctgccccgcgtccggtcccgagcgggcctccctcgggccagcccgatgtgaccgagcccagcggagcctgagcaaggagcgggtccgtcgcggagccggagggcgggaggaacatgacatcgcggagatggtttcacccaaatatcactggtgtggaggcagaaaacctactgttgacaagaggagttgatggcagttttttggcaaggcctagtaaaagtaaccctggagacttcacactttccgttagaagaaatggagctgtcacccacatcaagattcagaacactggtgattactatgacctgtatggaggggagaaatttgccactttggctgagttggtccagtattacatggaacatcacgggcaattaaaagagaagaatggagatgtcattgagcttaaatatcctctgaactgtgcagatcctacctctgaaaggtggtttcatggacatctctctgggaaagaagcagagaaattattaactgaaaaaggaaaacatggtagttttcttgtacgagagagccagagccaccctggagattttgttctttctgtgcgcactggtgatgacaaaggggagagcaatgacggcaagtctaaagtgacccatgttatgattcgctgtcaggaactgaaatacgacgttggtggaggagaacggtttgattctttgacagatcttgtggaacattataagaagaatcctatggtggaaacattgggtacagtactacaactcaagcagccccttaacacgactcgtataaatgctgctgaaatagaaagcagagttcgagaactaagcaaattagctgagaccacagataaagtcaaacaaggcttttgggaagaatttgagacactacaacaacaggagtgcaaacttctctacagccgaaaagagggtcaaaggcaagaaaacaaaaacaaaaatagatataaaaacatcctgccctttgatcataccagggttgtcctacacgatggtgatcccaatgagcctgtttcagattacatcaatgcaaatatcatcatgcctgaatttgaaaccaagtgcaacaattcaaagcccaaaaagagttacattgccacacaaggctgcctgcaaaacacggtgaatgacttttggcggatggtgttccaagaaaactcccgagtgattgtcatgacaacgaaagaagtggagagaggaaagagtaaatgtgtcaaatactggcctgatgagtatgctctaaaagaatatggcgtcatgcgtgttaggaacgtcaaagaaagcgccgctcatgactatacgctaagagaacttaaactttcaaaggttggacaagggaatacggagagaacggtctggcaataccactttcggacctggccggaccacggcgtgcccagcgaccctgggggcgtgctggacttcctggaggaggtgcaccataagcaggagagcatcatggatgcagggccggtcgtggtgcactgcagtgctggaattggccggacagggacgttcattgtgattgatattcttattgacatcatcagagagaaaggtgttgactgcgatattgacgttcccaaaaccatccagatggtgcggtctcagaggtcagggatggtccagacagaagcacagtaccgatttatctatatggcggtccagcattatattgaaacactacagcgcaggattgaagaagagcagaaaagcaagaggaaagggcacgaatatacaaatattaagtattctctagcggaccagacgagtggagatcagagccctctcccgccttgtactccaacgccaccctgtgcagaaatgagagaagacagtgctagagtctatgaaaacgtgggcctgatgcaacagcagaaaagtttcagatgagaaaacctgccaaaacttcagcacagaaatagatgtggactttcaccctctccctaaaaagatcaagaacagacgcaagaaagtttatgtgaagacagaatttggatttggaaggcttgcaatgtggttgactaccttttgataagcaaaatttgaaaccatttaaagaccactgtattttaactcaacaatacctgcttcccaattactcatttcctcagataagaagaaatcatctctacaatgtagacaacattatattttatagaatttgtttgaaattgaggaagcagttaaattgtgcgctgtattttgcagattatggggattcaaattctagtaataggcttttttatttttatttttatacccttaaccagtttaattttttttttcctcattgttggggatgatgagaagaaatgatttgggaaaattaagtaacaacgacctagaaaagtgagaacaatctcatttaccatcatgtatccagtagtggataattcattttgatggcttctatttttggccaaatgagaattaagccagtgcctgagactgtcagaagttgacctttgcactggcattaaagagtcatagaaaaagaatcatggatatttatgaattaaggtaagaggtgtggcttttttttttttcttttttccagccgttgaccaattatagttcggctgttgactgagaagtttgtggtgggaaaacgtttgccatattttctttgcatttgaataattgtcttgtacttagaaaaaaggcgtctatgaatgaccagtgtttttggtcgccaaatgttgctgacaaacttatcccaaaactttagtggcttaaaaaaacctgcccccaactgttagtcaatctgagctgggctcagctgggctgttcttctgccagcctgcaggtggccactcatgtggtcagcaggtcggcggagagactgggatggctgggcttctctctctgcctgcagtcctgagtctctccttcttcgtgtagtctctttcagtggcctggctggcagggtagctagacctctcacatgcagctcagagctcccaagagctcaaaagcagaaatggccaggccttctgaaaacttaagtccagaattgtcacagtgtcccttctacttccctctattgatgatgatgatgatgatgatgatgatgatgatgatgatgatgatggttttttctaatcagaagaaagctggggtatgccctctacttactaaacaagtcacaagcccagctcagattcaagaaaagggtgtgaagtagaggtgcagttaagtggggggccactagtctaacagacggtcacaaccagtgccatggaaaaccaaggatattagcaaaagcagaagttgctagtgaccttgggaagccgaagctgcttacagtagctgggacaagctgaaagtcagactaagaaataaagagagggccttcaagaagcttcctgaatgatttctgctagccctgagcctatttttggaaccagcacttggggaaactgatcttgtgaggatggatgtgtttagggacacagggcttttgagagcagcaccaccccactggggcatccccagacttgggaaacgtgactctttcttaatgccactgggttttagtcaggccacagtgagaaggaacagccctaacaggcctccagccaggttgaatgagctcatttttgttgtagccaaccagtaagatttgctaatgttctacattaagtgccttctccaaagacatccctctttgcctcatatgttgaatcatccagtgcggatatttcaatgaaaatatcattggttgacttttgtgatggtaataatgctatggcatctttgccatgaagttgtggcctccttggattcttctgactttggcttctgaaaggaaggcctagatccagccctggtggtagttcctttctgaggtctctcagtcccttgagactttggggtagtttggctgccattctcactgacaaaatgtatatcagcccccacctccaccccccaatattccttgaactttgaattgcttcagaacacaggtgtggcctgaaggtattcccttattagggaagtgtcactgctgtcttctagtcaaacttgtaaagaaaaagattccagttcagtatttgcagcaagaagcttgaatgctgttctttttatcgcattgttacatcgactcattctccattttgctttggttttgtcttgacttgacttgactttgggggtaaagtctttcaccagcacacaagagtttgattgtacaaatatatcttctgcattaacatctctgcctgttgcttaagatcagttgcttttatactcagaatggaaatacctgatcttggctagttttgttataagatattgatttcatttagatttccctccacgaggtcagcaaactatcatgttcttatgtaaacttaggccaaggccagagttatcatagtccctaggttgctacggcttatcatgtgcttggtaaaaggtgatcgcaggttctcagacgagtttactttacatgagatggaatcaggcagagaggctgggatgatggagaaagctcgaggtgaagttttaaaaaaaaagttgtggaaaggaaagttccaaagaggtggtttctgaggaagtcagagcgcccagggccagagcagtcagtaatgggtgaatgaggttgtttggaaagtcggtgtgacagacacatggatgccatctacttctaggttgctggtgggtattaaatatgcacaatattccatagctcactgaggattttaaaattataagcataggattttatattttggggtgaaagaattatctggcacattaggtattggagtttaaaaaaaaagccaaatttcacagtcttaataactttttttaaaaaaaactaaaaggcgcttcatgtccagtgtgtggcccttctgaaacttatggtcatctctcccactgaaaccaaggtcttttcaaatgtggctaaatggggatgaggagacacgggtaggactttcttggtgtgtgtgcattctttaaagagccaagttgcttcggggaaacagccaggaaaatggtcaagattatttttagaggttattttattggggattttaagaactaataacatcttgagttatttttaattcagggggatgtggaaaggtttgcaattgtcaagtgttttgttgtagcttagtatccataagggaaacttagactatagacataactacaaagccagtgcagcttttgttttctgtatgttgttgggggatcaactttcacacatagcaagcacatggcctccctgatgtcaggatgcctttgttaggatctgtatttgcccttaattttgttgaaatcttttttccttcttcctcttgaaaagttccaaaatatagtttattgtatctttcatcactaaaaatttgttcctttttcactatgggcagttcacacaaggcaaaaactattgaacagttggttttagtgtgttgtataactttgctgtatatcaaactaattttgacaagttttcatcctaagcctcaaatcatgtaattaataatttgcctgtttatttatgacctaattgtgattcttttattaataaaagctaatgggaaaaggatccctgattaagctgatgactagacctacaattaattttcctgcagtatatgaagtattgtaccagagtattaaaagatatgtaatattttattgataaatctatcctttaaaaggaatacgttttaggatgtcatcattttgatgtgaatcatgtaaatgttgataatatgctgtttattatacatttagtgtttcaagagattcacttaattgcctttttgcccacgtatattatgtagtctatttgcaactgttcttaaaaaaatgacattaaaagaatagtttatgtagagaaacattagtggatgttaattgtctccccacctatatttatgggtgttagcgcaactgctttgctagttgcaaagctgtattatcagagtaaaagtgtatttgtaaactgtatgggaactaaaaattaggaataaaaccattttcttatatgatggcaaaaaaaaaaaaaaaaaa

SEQ ID NO: 456 - protein, 403 aa, Homo sapiens
MSHRKFSAPRHGSLGFLPRKRSSRHRGKVKSFPKDDPSKPVHLTAFLGYKAGMTHIVREVDRPGSKVNKKEVVEAVTIVETPPMVVVGIVGYVETPRGLRTFKTVFAEHISDECKRRFYKNWHKSKKKAFTKYCKKWQDEDGKKQLEKDFSSMKKYCQVIRVIAHTQMRLLPLRQKKAHLMEIQVNGGTVAEKLDWARERLEQQVPVNQVFGQDEMIDVIGVTKGKGYKGVTSRWHTKKLPRKTHRGLRKVACIGAWHPARVAFSVARAGQKGYHHRTEINKKIYKIGQGYLIKDGKLIKNNASTDYDLSDKSINPLGGFVHYGEVTNDFVMLKGCVVGTKKRVLTLRKSLLVQTKRRALEKIDLKFIDTTSKFGHGRFQTMEEKKAFMGPLKKDRIAKEEGA

SEQ ID NO: 457 - protein, 240 aa, Homo sapiens
MAGEKVEKPDTKEKKPEAKKVDAGGKVKKGNLKAKKPKKGKPHCSRNPVLVRGIGRYSRSAMYSRKAMYKRKYSAAKSKVEKKKKEKVLATVTKPVGGDKNGGTRVVKLRKMPRYYPTEDVPRKLLSHGKKPFSQHVRKLRASITPGTILIILTGRHRGKRVVFLKQLASGLLLVTGPLVLNRVPLRRTHQKFVIATSTKIDISNVKIPKHLTDAYFKKKKLRKPRHQEGEIFDTEKEKY

SEQ ID NO: 458 - DNA, 1106 bp, Homo sapiens
  source 1..1106: mol_type = other DNA
accttaattctctttcccatcttgcaaggtaagaatcgcgggcctgtctgcaagacttgagttcaggactcccaatccttcgccatccgaacctggagggcatccagtcgacacctacaggggtcggacatgtccaaggctaactgagaggccttccagacgcttcatttttgttgtttgggtttgcggcagggcacaaagaggatggcgggtgaaaaagttgagaagccagatactaaagagaagaaacccgaagccaagaaggttgatgctggtggcaaggtgaaaaagggtaacctcaaagctaaaaagcccaagaaggggaagccccattgcagccgcaaccctgtccttgtcagaggaattggcaggtattcccgatctgccatgtattccagaaaggccatgtacaagaggaagtactcagccgctaaatccaaggttgaaaagaaaaagaaggagaaggttctcgcaactgttacaaaaccagttggtggtgacaagaacggcggtacccgggtggttaaacttcgcaaaatgcctagatattatcctactgaagatgtgcctcgaaagctgttgagccacggcaaaaaacccttcagtcagcacgtgagaaaactgcgagccagcattacccccgggaccattctgatcatcctcactggacgccacaggggcaagagggtggttttcctgaagcagctggctagtggcttattacttgtgactggacctctggtcctcaatcgagttcctctacgaagaacacaccagaaatttgtcattgccacttcaaccaaaatcgatatcagcaatgtaaaaatcccaaaacatcttactgatgcttacttcaagaagaagaagctgcggaagcccagacaccaggaaggtgagatcttcgacacagaaaaagagaaatatgagattacggagcagcgcaagattgatcagaaagctgtggactcacaaattttaccaaaaatcaaagctattcctcagctccagggctacctgcgatctgtgtttgctctgacgaatggaatttatcctcacaaattggtgttctaaatgtcttaagaacctaattaaatagctgactacat

SEQ ID NO: 459 - protein, 188 aa, Homo sapiens [sequence omitted]

SEQ ID NO: 460 - DNA, 643 bp, Homo sapiens
  source 1..643: mol_type = other DNA
ctctttccggacctggccgagcaggaggcgccatcatgggagtggacatccgccataacaaggaccgaaaggttcggcgcaaggagcccaagagccaggatatctacctgaggctgttggtcaagttatacaggtttctggccagaagaaccaactccacattcaaccaggttgtgttgaagaggttgtttatgagtcgcaccaaccggccgcctctgtccctttcccggatgatccggaagatgaagcttcctggccgggaaaacaagacggccgtggttgtggggaccataactgatgatgtgcgggttcaggaggtacccaaactgaaggtatgtgcactgcgcgtgaccagccgggcccgcagccgcatcctcagggcagggggcaagatcctcactttcgaccagctggccctggactcccctaagggctgtggcactgtcctgctctccggtcctcgcaagggccgagaggtgtaccggcatttcggcaaggccccaggaaccccgcacagccacaccaaaccctacgtccgctccaagggccggaagttcgagcgtgccagaggccgacgggccagccgaggctacaaaaactaaccctggatcctactctcttattaaaaagatttttgctgaca

SEQ ID NO: 461 - protein, 309 aa, Homo sapiens
MDEKVFTKELDQWIEQLNECKQLSESQVKSLCEKAKEILTKESNVQEVRCPVTVCGDVHGQFHDLMELFRIGGKSPDTNYLFMGDYVDRGYYSVETVTLLVALKVRYRERITILRGNHESRQITQVYGFYDECLRKYGNANVWKYFTDLFDYLPLTALVDGQIFCLHGGLSPSIDTLDHIRALDRLQEVPHEGPMCDLLWSDPDDRGGWGISPRGAGYTFGQDISETFNHANGLTLVSRAHQLVMEGYNWCHDRNVVTIFSAPNYCYRCGNQAAIMELDDTLKYSFLQFDPAPRRGEPHVTRRTPDYFL

SEQ ID NO: 462 - DNA, 4582 bp, Homo sapiens
  source 1..4582: mol_type = other DNA
acagagagccgagctctggagcctcagcgagcggaggaggaggcgcagcggccgacggccgagtactgcggtgagagccagcgggccagcgccagcctcaacagccgccagaagtacacgaggaaccggcggcggcgtgtgcgtgtaggcccgtgtgcgggcggcggcgcgggagcagcgcggagcggcagccggctggggcgggtggcatcatggacgagaaggtgttcaccaaggagctggaccagtggatcgagcagctgaacgagtgcaagcagctgtccgagtcccaggtcaagagcctctgcgagaaggctaaagaaatcctgacaaaagaatccaacgtgcaagaggttcgatgtccagttactgtctgtggagatgtgcatgggcaatttcatgatctcatggaactgtttagaattggtggcaaatcaccagatacaaattacttgtttatgggagattatgttgacagaggatattattcagttgaaacagttacactgcttgtagctcttaaggttcgttaccgtgaacgcatcaccattcttcgagggaatcatgagagcagacagatcacacaagtttatggtttctatgatgaatgtttaagaaaatatggaaatgcaaatgtttggaaatattttacagatctttttgactatcttcctctcactgccttggtggatgggcagatcttctgtctacatggtggtctctcgccatctatagatacactggatcatatcagagcacttgatcgcctacaagaagttccccatgagggtccaatgtgtgacttgctgtggtcagatccagatgaccgtggtggttggggtatatctcctcgaggagctggttacacctttgggcaagatatttctgagacatttaatcatgccaatggcctcacgttggtgtctagagctcaccagctagtgatggagggatataactggtgccatgaccggaatgtagtaacgattttcagtgctccaaactattgttatcgttgtggtaaccaagctgcaatcatggaacttgacgatactctaaaatactctttcttgcagtttgacccagcacctcgtagaggcgagccacatgttactcgtcgtaccccagactacttcctgtaatgaaattttaaacttgtacagtattgccatgaaccatatatcgacctaatggaaatgggaagagcaacagtaactccaaagtgtcagaaaatagttaacattcaaaaaacttgttttcacatggaccaaaagatgtgccatataaaaatacaaagcctcttgtcatcaacagccgtgaccactttagaatgaaccagttcattgcatgctgaagcgacattgttggtcaagaaaccagtttctggcatagcgctatttgtagttacttttgctttctctgagagactgcagataataagatgtaaacattaacacctcgtgaatacaatttaacttccatttagctatagctttactcagcatgactgtagataaggatagcagcaaacaatcattggagcttaatgaacatttttaaaaataattaccaaggcctcccttctacttgtgagttttgaaattgttctttttattttcagggataccgtttaatttaattatatgatttgtctgcactcagtttattccctactcaaatctcagccccatgttgttctttgttattgtcagaacctggtgagttgttttgaacagaactgttttttccccttcctgtaagacgatgtgactgcacaagagcactgcagtgtttttcataataaacttgtgaactaagaactgagaaggtcaaattttaattgtatcaatgggcaagactggtgctgtttattaaaaaagttaaatcaattgagtaaattttagaatttgtagacttgtaggtaaaataaaaatcaagggcactacataacctctctggtaactccttgacattcttcagattaacttcaggatttatttgtatttcacatattacaatttgtcacattgttggtgtgcactttgtgggttcttcctgcatattaacttgtttgtaagaaaggaaatctgtgctgcttcagtaagacttaattgtaaaaccatataacttgagatttaagtctttgggttttgttttaataaaacagcatgttttcaggtagagcttaaactaaatgatgtgtttacttagtgcagtttctggttatgaatattatattgctatgtgtatattatatggactctttaaaatgattgacagattggcaaattcttaaatctttgtacattgttgagtcatatgttcttagagttaaatttgtctcagataagaaagtgttaaagcattagcctgtgtcaagttctttgagtgatactagtgaaaccaaatagaaaactattgttggatcatgatttagtcttatgtacattcacccgaagacaaaaatggtacttaaagtggcagtgttcaacatttaatgagtttttccccttttatccttcgaataggattagatgtttaaaaaaaagttcttctgtgggaactaatatttgatattttaacctaccagagtaaacaggaacacttaatcatacttgtgagtgtagtaaataaaagttttcttgctttgtgctgtgttgaatctggaaccaacagggaagttatagcatatcccctttctaaaatgcttgaggaacacatacataccgaatgtcttttctgatctaattgatagtatttttagtggcttgtggagttaattttccaaagcaaaaggccattagggtttctacatttcatttcatttcattcttttctttcacaagaaatacattctctgtgtgtctttttgttgctctgtcactctatgccctttctctccgactgaacaaatagcttatccatgtgcagtggttttaatacccaaacaatctagacaccaagcagctattttttccggtcctgtgatatcagaattgaccaaggaatacgtatattgtaattgacacgtggtggtatcttccaggtacaaattctctaaattttgtggttagcagaatgggacttgtgataagaatagcttggttttagcataactagggtttaaaataattgtttaattatagagactgaccgggctttggccatctaaactggaaagtgttagtaccctaccttcttttgaaaatggctatggtaaggaaaatgtgttagtaaattatgtattttcttgaaaaatacataattatggttggatgggaatcactaagttgggtgttaactgatgtctcaattagtaacattaggattttcattaataaacctaaaaagctttccctaagaacaggcctggcacagtggctcatgcctgtaatcccagcactttgggagaccagggtgggtggatcccttgaggtcaggagttgaagagcagcctggccaacatggcaaaaccccatctctacaaaaaatatgaaaatcagccgggcttggtggcataccatagtcccagctacttgggaggctgaggtgagaggatcgcctgagcccaggagatggaggttgcagtgggctgagattgtgccactgtactccagtctgggtgacagagccagaccctgtctcaaaaataaagaggattctgagtttgtatagtgagggcttgcagaaattttgaaacttattttgtaagtttacaatgaatttgtacatgatgtgctcatgtcttgggttgagtatcctagacatgattttttcatttgctgcatattaaacatttgttggttgtagtcggtatttcttaaatagaagtttgtcaatattagattagtttcaagaaggacttagctcaggaaaaggatagttatttctgtggttctcagctttgatgcctacagagattctgatttaaattgctggaggagggcccaggcatacattttttaagtttcccaagtgattctaatttacatctagggttaaaaacagccaggcgcggtggctcatgcctgtaatcccagcacttggggaggccggggtgggtggatcacctgatgtcaggagatcgagaccagcctggccagcgtggtgaaaccccatctctattaaaaatacaaaactgaccggtgtggtggcaggagcctgtaatcccagctacttgggaggctgaggcaggagaatcacttgaactcaggaggaggaggttacagtgagcccagatcgtgccattgcactccagcctgggcaaaaagagcaaaactccatctcaaaaaacaaaaacacctcactgctgtttcctaagtacatacttaagaaaattgggatacatggtggtggttcatggatgttgataaggaattaaaatgtaccgtgcgactctctgtttcagtggtgacttttacctgtttagtataaatattcctttgcttccaaccataaatgtgttcttagaaatgggcctatagtttagtaacctatagtttggtaataggcttgtttgttttcagatggattttggttctgtgagctaaagctattttgcattaaagccttcgtcctcaca

SEQ ID NO: 463 - protein, 115 aa, Homo sapiens [sequence omitted]

SEQ ID NO: 464 - DNA, 498 bp, Homo sapiens
  source 1..498: mol_type = other DNA
cctttctcgttccccggccatcttagcggctgctgttggttgggggccgtcccgctcctaaggcaggaagatggtggccgcaaagaagacgaaaaagtcgctggagtcgatcaactctaggctccaactcgttatgaaaagtgggaagtacgtcctggggtacaagcagactctgaagatgatcagacaaggcaaagcgaaattggtcattctcgctaacaactgcccagctttgaggaaatctgaaatagagtactatgctatgttggctaaaactggtgtccatcactacagtggcaataatattgaactgggcacagcatgcggaaaatactacagagtgtgcacactggctatcattgatccaggtgactctgacatcattagaagcatgccagaacagactggtgaaaagtaaaccttttcacctacaaaatttcacctgcaaaccttaaacctgcaaaattttcctttaataaaatttgcttgttttaaaaa

SEQ ID NO: 465 - protein, 590 aa, Homo sapiens
MTLHNNSTTSPLFPNISSSWIHSPSDAGLPPGTVTHFGSYNVSRAAGNFSSPDGTTDDPLGGHTVWQVVFIAFLTGILALVTIIGNILVIVSFKVNKQLKTVNNYFLLSLACADLIIGVISMNLFTTYIIMNRWALGNLACDLWLAIDYVASNASVMNLLVISFDRYFSITRPLTYRAKRTTKRAGVMIGLAWVISFVLWAPAILFWQYFVGKRTVPPGECFIQFLSEPTITFGTAIAAFYMPVTIMTILYWRIYKETEKRTKELAGLQASGTEAETENFVHPTGSSRSCSSYELQQQSMKRSNRRKYGRCHFWFTTKSWKPSSEQMDQDHSSSDSWNNNDAAASLENSASSDEEDIGSETRAIYSIVLKLPGHSTILNSTKLPSSDNLQVPEEELGMVDLERKADKLQAQKSVDDGGSFPKSFSKLPIQLESAVDTAKTSDVNSSVGKSTATLPLSFKEATLAKRFALKTRSQITKRKRMSLVKEKKAAQTLSAILLAFIITWTPYNIMVLVNTFCDSCIPKTFWNLGYWLCYINSTVNPVCYALCNKTFRTTFKMLLLCQCDKKKRRKQQYQQRQSVIFHKRAPEQAL

SEQ ID NO: 466 - DNA, 8793 bp, Homo sapiens
  source 1..8793: mol_type = other DNA
gggcaatggcgggcgcccctcccccagcctcgttgccgccttgcagtttgatctcagactgctgtgctagcaatcagcgagactccgtgggcgtaggaccctccgagccaggtgtgggatatagtctcgtggtgcgccgtttcttaagctggtctgaaaagcgcaatattcgggtgggagtgacccgattttccaggtgcttccgtcacccctttctttgactcggaaagggaactccctgaccccttgcgcttcccaggtgaggcaatgcctcgccctgcttcggctcgcgcacggtgcgcgcacacactggcctgcgcccactgtctagcactccctagtgagatgaacccggtacctcagatggaaatgcagaaatcacccgtcttctgcgtcgctcacgctgggagctgtagaccggagctgttcctattcggccatcttggctcctagtatttttaattaagcacttgtgttctgattagtggccaaataaatgacagtcagaacttcagctaaggtacaataaggttttgctgtggcgtggcacctggtctctttctagaaggaaagttcaacatacagcacaattctggacacattgtattggtttgatgctcctacctggaacaggtggagctggtctcttgggcagcctgacatctggtccactcctctgtcctatgccgggatcatcatgaccgtagagattatgtcactgttttgcatccttgttacataactcagttcctggtagattactatgtcagagagtcacaatgaccttgcacaataacagtacaacctcgcctttgtttccaaacatcagctcctcctggatacacagcccctccgatgcagggctgcccccgggaaccgtcactcatttcggcagctacaatgtttctcgagcagctggcaatttctcctctccagacggtaccaccgatgaccctctgggaggtcataccgtctggcaagtggtcttcatcgctttcttaacgggcatcctggccttggtgaccatcatcggcaacatcctggtaattgtgtcatttaaggtcaacaagcagctgaagacggtcaacaactacttcctcttaagcctggcctgtgccgatctgattatcggggtcatttcaatgaatctgtttacgacctacatcatcatgaatcgatgggccttagggaacttggcctgtgacctctggcttgccattgactacgtagccagcaatgcctctgttatgaatcttctggtcatcagctttgacagatacttttccatcacgaggccgctcacgtaccgagccaaacgaacaacaaagagagccggtgtgatgatcggtctggcttgggtcatctcctttgtcctttgggctcctgccatcttgttctggcaatactttgttggaaagagaactgtgcctccgggagagtgcttcattcagttcctcagtgagcccaccattacttttggcacagccatcgctgctttttatatgcctgtcaccattatgactattttatactggaggatctataaggaaactgaaaagcgtaccaaagagcttgctggcctgcaagcctctgggacagaggcagagacagaaaactttgtccaccccacgggcagttctcgaagctgcagcagttacgaacttcaacagcaaagcatgaaacgctccaacaggaggaagtatggccgctgccacttctggttcacaaccaagagctggaaacccagctccgagcagatggaccaagaccacagcagcagtgacagttggaacaacaatgatgctgctgcctccctggagaactccgcctcctccgacgaggaggacattggctccgagacgagagccatctactccatcgtgctcaagcttccgggtcacagcaccatcctcaactccaccaagttaccctcatcggacaacctgcaggtgcctgaggaggagctggggatggtggacttggagaggaaagccgacaagctgcaggcccagaagagcgtggacgatggaggcagttttccaaaaagcttctccaagcttcccatccagctagagtcagccgtggacacagctaagacttctgacgtcaactcctcagtgggtaagagcacggccactctacctctgtccttcaaggaagccactctggccaagaggtttgctctgaagaccagaagtcagatcactaagcggaaaaggatgtccctggtcaaggagaagaaagcggcccagaccctcagtgcgatcttgcttgccttcatcatcacttggaccccatacaacatcatggttctggtgaacaccttttgtgacagctgcatacccaaaaccttttggaatctgggctactggctgtgctacatcaacagcaccgtgaaccccgtgtgctatgctctgtgcaacaaaacattcagaaccactttcaagatgctgctgctgtgccagtgtgacaaaaaaaagaggcgcaagcagcagtaccagcagagacagtcggtcatttttcacaagcgcgcacccgagcaggccttgtagaatgaggttgtatcaatagcagtgacaaaacgcacacatcaacccacagaccttaggaggaggaaggcgagggcggggtgacttctggtgatgataaaaatggttttatcacccagatgtgaaagaagctgcctgtttactgatccattgaataaacccattttaatagaaaaagtcaataccaattcagcaaaaagaaaaaaaaaacatactactgaatataaagaaatttattctgaaatagactttacgtgtttttttcttaaagaggagaaaaatattgcttgacggcaattatatacccaaagtgatttgcctgggtcctttaattcccattagctttggaatctcagatgagcatagctgacccagttcccacattcttcccaaggatcccaaaagtgggaatccagaccccaagtggaacactgcaggcttacgaatctgtggttccaaaattatttcatacgttgcaaagctgaatcttcttgtcccaatagagcttcctgtcttttctttggtgtgttgttaaactctatttgtggacttgattcttgattcttgcaaagtactgttttgtgcagttcaagtttcgtacaaataaaaatacttaagtatatatatatgtgtgagttctgcacgcacacacatagtgtatataatatcatgggaaacactgaactggcaaattattcctgcaacatacgctttcagtactttggtaactgaagttctctaggatcctaatgcaacattaacgtgaaataagcccagtgtaatgtttttgaaaccagggctgttttccacagagagcagccaggccttcccagcaggtctgtgcagagcggacaggctcgtgagtcagctgagcgccgtggcttcgccagacttggtgttaagcaacctcctttgttgatgtctcaacagagctaaatcggggcccctctgagctcaaagaatgaaccacatccacacgtttgaatttaatcatctaaatctgaatgtttcagaacaaaatttctgctatctaaactgcttgaaactcaataatagtgtcacgtttgaatgtcatacacagcaatatatatatatgtgtatatatatatatatggcaaagcaaaaaaaaaaacatggtaagagagaatgaaggagaacattgtgtttgattcttgctgaatggcaccttctcaaagaaaatagggcttgcacctttgttaatcagctgtggccagtgctttctggtgttcattgtgtaaccttcacccaggaataggtgaggttttaggaagttacatgtcctctgaagaaagaattacactctgaaaagtaatgcttcaaattgatttccttaccttttgggaaaaaaaaaaaattgtttttttgcattctcccttgaattgaccaaaatgttaactgtttcatttggggaggggatggggtgctgccatcattgtcgttgttgttgctgctgtagctgttggggtttcttttcctgttgccggggctgtttggggagagggaggggagggaggtgggagggccgcggagatatcttccctttgtacagggcattcgtgttgtgaacccagagctgggtagaagctgcttttgtattcagtgtgaggtggtgtttacagacgactttgacaacagtagaagtgtactcagtggtgtctgtgtatctgaactatttaatttcgtgttatgtttatatgcagaaatatttatggatactacaccaagtgtttatttaatgttgataaatatgactcttcagtcgtcagccatggtgtcctttcaaagtgattctttaaggtccacttgagcaatgaatagagtatattggagctttcctgtggctaagaagaagaaacatgtcatcctgttggcatcaccaagcacctaactctttctaggtaataaaaagtcaacggtcacttcaacgtaaatgtttaaaaccactctttagttaaatctgatgggaactgaacaaagctccaccattgtgtctgaaatcattttacacagggaaaaaaaaaaacaatcagcataattgtaagaatgatttttttgggcccacattcaaccaaagaacaagaaagaaacagacgattttctaatatgtacacagcaaactacagaatgtcatattatccacctgtgaaacatctagtaagcaattgcatctatattttatttctcaagttggcctggcactaataaatatgtgaaagcttattcaagtgtcccagtacttcagcacttcccatccttttggaaactcctatcttgcctccctcccaaaagggctgtttcttttattaaaaaaaaaaaagaaatagaattaaatttgagaaaaggagaaaccctgaaatttaacagaactttgagagtcacttccaatctccttaaacatgattatctccttatccttgtccttttgtgatgctaataatagcagaaaaggaacaaatccaagactctaggtctcccttttttgttttactggttttattatagaattgtttttaagcctcttatggatgaaagctgcatttaaatactatctactgattttatagaaaggtatgtccatttcttgggtcactttcagagaaagaaaacaagcaaaataggttcttttgaatatgaataatttaaaagcataattgaagatgtagtgagtatttataattggaccttagttacacgtgcatttctcaaagggcttgtcattacaggagatattcagcacttacctaagatcaaaatgtcttcatcccaaattgggaatcgaattatttcatgccatatgcatgaggtttgcagacatttcaagattagccactttgcttgaaagaagaaaatgatcaaacctaaaataaactacacatggagaatctctctctctctctctgcctctctctctctctttctccctcttcttccttctctctctctcacaagcacacacacacacactcaatctccattctccaggcattgccagatggttaggagaagtgagctctctctggtcccctagatccctcggctctgctctcctttgcccatcagctccctgtggcctctatgctagtcctccctattctcctagtcaccctttgcctcttaagcccagccttgactctctacatatttttcatttctctttaccctttagtgtacaatagttgtagactctgacggaatgaaaacaaacaagaagcctaagcgttagaccctgctgtggctaaagatctagaaggcatatcagttttctctgtcaggcttcctacgttgccctcgtgcagggctcattgctctgcagagcgctggaagccccttcatgtatcgagagagaagctggagcacagagctctgatgcacagttggctgtttcagctctgactcagggaggaaagaaggatgccaaggctctgtcacagcggagaagtctaataccagagtggcacagagaaggattccagggatcagtcagggtgtcctgtacctatctgagtagagatgattcaaggatggggacatattccaggaaattgcacaatcttcccctggcagcttcagaggacgagtgaaaatagtgcagtatagtcaaagaagcaatgaatttaggatgaggaacctgaagtttctggaccagtttggtcactgcttagttacatgtccttaggaatgcttgtcacttaacctaaactttctgggttttatcctcattgctcaaactaagcaacaacaccgaagcttctctaatttgccttctgatgccaaatcggtcaaaactgaggtcagcagctaccatgacgaaagtaaaatggtatattgggtgaatgtttgaaaatttcagattttatattctgtaaagttatttacttactctatttcaacaccacaaaatcttgaaatttggaaggtaaccaaggaagctttgaaatttgttggcaaacccggagtagtatggtttcaaataccactccaacccagcacctgaggtcgggcaaactcacaaaatagagtttctaggtagcaggtgtttgctttggttttgcaatagcatttctcataacagaactgaaactgtatagattacaacactccaaagttatttttttttaacctaaagaaccctacttctagcacctcctctgaaagaatattttgctccaataccacgtgcaacaaacttatttagacagtatcaactctagcccttaataggttcaaggacaagtttactgcttcctttctacacgcttaagttacactctcttctcctgttctgatgactctaaatcttcagcctctcccagcattaatgtgtgagtcaacattgcagacctgagaaaggtttctagaatggtaacccaatgttctttagaactggagaattccattttccttttctggctttagtgttaatgtctgggaagggaggctcatgataagaaaataaaaatgagaaaagaagatctagttcataaaatgactataccccacgtaagtttgtaactgcacagtgttttgttgtacggctcagaaatgagcaagtgttagtattattaggcacacatcacgttcacagcttcgcgcagagacggatagtgtatttggatatatggaagtcatccaaatgcgttgctagaatatcaggcctatgtttgttctggtagaaccacagagactcacacaaagttctgaccctaccactctggtctgggctgagaccaccccaaaaaatcatctagagaatcaaaggggctcacatctcagttgcattctatttaaaagataaaggggccatactctccactgcaaagaagcattagtaaaacttcccgcacccaaattataatccggcaaccctagcttcagctaaaaagattatccccagaatctaaaagcttactattgttctttcttggagtccaaaatgcttagcagttctgcagttcacatacaaaactcaaaactctttttatcctgtattctgtgagttccttgatgatagtaattgggtcttattcatcactctgtatcctgtggctcacacagaatctggcaaattgcatatattcaataaatgttgaatatctaataacctccttattaatataacaaatattatcaacattctgtgcacatcaatgtcccatgctgctactgtagtcaggagttatttggctgggaagtggaaagtgttcacaaacatgatgcttatctaataaaatatcactgagcaataaggagaaatattttaaatagatttgaagttgtgaacaaataatttagagtccaaagaggaaaaagaaaattaactctgttttttatccctagaactcagaaactttactggattggtcaacaaagacaaactttttattgtataaaacagtagaattcatggaagggataattcttttggaacaggcttctcggttacttgccttagtaaaagaagtatctggagggcctggagagttcataaacatagttttctgtgcaagtgaagatctgtagtttggcttaaaaatccttgcatgtagttttgcttggcgtggaaagttattaggagacaatcctttatcctgttctgcaagcaatcaaacacatgatctcccttctagccattcctcatccagtacatgggcatttccagcctcctacatgtaacacttcaaacttcctctgggcgtctgcttagagctatgtgatggccacagtttgggcaaagcccttctttcttttaaatataggaactgttaccaagtttggtgcaggcttgaggaataattacataaaaatgggcttccacgatggtgaatcagcatgctgatttctcttggcaggaagctctcagggaaatgtctgtgaatcatttaaagatgctctctggtggatagagaaaccgcagtccaaaaacagatgggtgtatatttgctttgtaagcaaagggcatgtatcatactcgcatctaaaacagtgtccacatctttgccaaaggcactgaattttacctttttttattacctcgtggccagcacttcctcagtaggcatttcaggtgtgtcacaaaccatgttcatttttaatcttgaaaaagtcaatcgtctgtagtctgtactataaaatgatgcctgcaactttgtggtgaatattatccccaagttaacagtgaaataagtaaataaaactattattgaacaaaaaaaaaaaaaaaaaa

SEQ ID NO: 467 - protein, 912 aa, Homo sapiens
MPGKRGLGWWWARLPLCLLLSLYGPWMPSSLGKPKGHPHMNSIRIDGDITLGGLFPVHGRGSEGKPCGELKKEKGIHRLEAMLFALDRINNDPDLLPNITLGARILDTCSRDTHALEQSLTFVQALIEKDGTEVRCGSGGPPIITKPERVVGVIGASGSSVSIMVANILRLFKIPQISYASTAPDLSDNSRYDFFSRVVPSDTYQAQAMVDIVRALKWNYVSTVASEGSYGESGVEAFIQKSREDGGVCIAQSVKIPREPKAGEFDKIIRRLLETSNARAVIIFANEDDIRRVLEAARRANQTGHFFWMGSDSWGSKIAPVLHLEEVAEGAVTILPKRMSVRGFDRYFSSRTLDNNRRNIWFAEFWEDNFHCKLSRHALKKGSHVKKCTNRERIGQDSAYEQEGKVQFVIDAVYAMGHALHAMHRDLCPGRVGLCPRMDPVDGTQLLKYIRNVNFSGIAGNPVTFNENGDAPGRYDIYQYQLRNDSAEYKVIGSWTDHLHLRIERMHWPGSGQQLPRSICSLPCQPGERKKTVKGMPCCWHCEPCTGYQYQVDRYTCKTCPYDMRPTENRTGCRPIPIIKLEWGSPWAVLPLFLAVVGIAATLFVVITFVRYNDTPIVKASGRELSYVLLAGIFLCYATTFLMIAEPDLGTCSLRRIFLGLGMSISYAALLTKTNRIYRIFEQGKRSVSAPRFISPASQLAITFSLISLQLLGICVWFVVDPSHSVVDFQDQRTLDPRFARGVLKCDISDLSLICLLGYSMLLMVTCTVYAIKTRGVPETFNEAKPIGFTMYTTCIVWLAFIPIFFGTSQSADKLYIQTTTLTVSVSLSASVSLGMLYMPKVYIILFHPEQNVPKRKRSLKAVVTAATMSNKFTQKGNFRPNGEAKSELCENLEAPALATKQTYVTYTNHAI

SEQ ID NO: 468 - DNA, 7368 bp, Homo sapiens
  source 1..7368: mol_type = other DNA
gctgtacttttctgggtgtgtgttagggaggctatgttcctgaccctccccctctggggtgagaaggggtccccgccatgtcctcggggttggtaggaggagaggattggagctgttttctccttgatgccaagatacgccaagctaggagcattctgccctttccacagtcatccaccgagaacaggcctgcaggacgggacaaggatcagagccttcctgcaaccccggccactgcctgctgtctgtgggcctggactgtgcgggcaactgtgcttggcccgagtgacaaggaggtgggagagggtagcagcatgggctacgcggttggctgccctcagtccccctgctgctgaagctgccctgcccatgcccacccaggccgtggggccaggggcctgccagggctaggagtgggcctgccgttcatgggtctctagggatttccgagatgcctgggaagagaggcttgggctggtggtgggcccggctgcccctttgcctgctcctcagcctttacggcccctggatgccttcctccctgggaaagcccaaaggccaccctcacatgaattccatccgcatagatggggacatcacactgggaggcctgttcccggtgcatggccggggctcagagggcaagccctgtggagaacttaagaaggaaaagggcatccaccggctggaggccatgctgttcgccctggatcgcatcaacaacgacccggacctgctgcctaacatcacgctgggcgcccgcattctggacacctgctccagggacacccatgccctcgagcagtcgctgacctttgtgcaggcgctcatcgagaaggatggcacagaggtccgctgtggcagtggcggcccacccatcatcaccaagcctgaacgtgtggtgggtgtcatcggtgcttcagggagctcggtctccatcatggtggccaacatccttcgcctcttcaagataccccagatcagctacgcctccacagcgccagacctgagtgacaacagccgctacgacttcttctcccgcgtggtgccctcggacacgtaccaggcccaggccatggtggacatcgtccgtgccctcaagtggaactatgtgtccacagtggcctcggagggcagctatggtgagagcggtgtggaggccttcatccagaagtcccgtgaggacgggggcgtgtgcatcgcccagtcggtgaagataccacgggagcccaaggcaggcgagttcgacaagatcatccgccgcctcctggagacttcgaacgccagggcagtcatcatctttgccaacgaggatgacatcaggcgtgtgctggaggcagcacgaagggccaaccagacaggccatttcttctggatgggctctgacagctggggctccaagattgcacctgtgctgcacctggaggaggtggctgagggtgctgtcacgatcctccccaagaggatgtccgtacgaggcttcgaccgctacttctccagccgcacgctggacaacaaccggcgcaacatctggtttgccgagttctgggaggacaacttccactgcaagctgagccgccacgccctcaagaagggcagccacgtcaagaagtgcaccaaccgtgagcgaattgggcaggattcagcttatgagcaggaggggaaggtgcagtttgtgatcgatgccgtgtacgccatgggccacgcgctgcacgccatgcaccgtgacctgtgtcccggccgcgtggggctctgcccgcgcatggaccctgtagatggcacccagctgcttaagtacatccgaaacgtcaacttctcaggcatcgcagggaaccctgtgaccttcaatgagaatggagatgcgcctgggcgctatgacatctaccaataccagctgcgcaacgattctgccgagtacaaggtcattggctcctggactgaccacctgcaccttagaatagagcggatgcactggccggggagcgggcagcagctgccccgctccatctgcagcctgccctgccaaccgggtgagcggaagaagacagtgaagggcatgccttgctgctggcactgcgagccttgcacagggtaccagtaccaggtggaccgctacacctgtaagacgtgtccctatgacatgcggcccacagagaaccgcacgggctgccggcccatccccatcatcaagcttgagtggggctcgccctgggccgtgctgcccctcttcctggccgtggtgggcatcgctgccacgttgttcgtggtgatcacctttgtgcgctacaacgacacgcccatcgtcaaggcctcgggccgtgaactgagctacgtgctgctggcaggcatcttcctgtgctatgccaccaccttcctcatgatcgctgagcccgaccttggcacctgctcgctgcgccgaatcttcctgggactagggatgagcatcagctatgcagccctgctcaccaagaccaaccgcatctaccgcatcttcgagcagggcaagcgctcggtcagtgccccacgcttcatcagccccgcctcacagctggccatcaccttcagcctcatctcgctgcagctgctgggcatctgtgtgtggtttgtggtggacccctcccactcggtggtggacttccaggaccagcggacactcgacccccgcttcgccaggggtgtgctcaagtgtgacatctcggacctgtcgctcatctgcctgctgggctacagcatgctgctcatggtcacgtgcaccgtgtatgccatcaagacacgcggcgtgcccgagaccttcaatgaggccaagcccattggcttcaccatgtacaccacttgcatcgtctggctggccttcatccccatcttctttggcacctcgcagtcggccgacaagctgtacatccagacgacgacgctgacggtctcggtgagtctgagcgcctcggtgtccctgggaatgctctacatgcccaaagtctacatcatcctcttccacccggagcagaacgtgcccaagcgcaagcgcagcctcaaagccgtcgttacggcggccaccatgtccaacaagttcacgcagaagggcaacttccggcccaacggagaggccaagtctgagctctgcgagaaccttgaggccccagcgctggccaccaaacagacttacgtcacttacaccaaccatgcaatctagcgagtccatggagctgagcagcaggaggaggagccgtgaccctgtggaaggtgcgtcgggccagggccacacccaagggcccagctgtcttgcctgcccgtgggcacccacggacgtggcttggtgctgaggatagcagagcccccagccatcactgctggcagcctgggcaaaccgggtgagcaacaggaggacgaggggccggggcggtgccaggctaccacaagaacctgcgtcttggaccattgcccctcccggccccaaaccacaggggctcaggtcgtgtgggccccagtgctagatctctccctcccttcgtctctgtctgtgctgttggcgacccctctgtctgtctccagccctgtctttctgttctcttatctctttgtttcaccttttccctctctggcgtccccggctgcttgtactcttggccttttctgtgtctcctttctggctcttgcctccgcctctctctctcatcctctttgtcctcagctcctcctgctttcttgggtcccaccagtgtcacttttctgccgttttctttcctgttctcctctgcttcattctcgtccagccattgctcccctctccctgccacccttccccagttcaccaaaccttacatgttgcaaaagagaaaaaaggaaaaaaaatcaaaacacaaaaaagccaaaacgaaaacaaatctcgagtgtgttgccaagtgctgcgtcctcctggtggcctctgtgtgtgtccctgtggcccgcagcctgcccgcctgccccgcccatctgccgtgtgtcttgcccgcctgccccgcccgtctgccgtctgtcttgcccgcctgcccgcctgcccctcctgccgaccacacggagttcagtgcctgggtgtttggtgatggttattgacgacaatgtgtagcgcatgattgtttttataccaagaacatttctaataaaaataaacacatggttttgcacccgggctccacatccactgagggtcctgccatgggaccacaggctcagcctgcagctggagggcttagacctagagggaagcgggaactgggctctggagacccagggcttgggggctgtggagactgctccctaggctgggatctagtgtggtgtggtgaggccttgggcatggaggggccagattcccaggtaaggggcagggacattgcaggaaattccaggaatcagcacctagtagtcccctaattagggggtatgctctgtcccctgccctgcagccctgggagggtaacatttctgccttgcctgtcctctgtctcacacccctcacacctgggactgcccttccacccctgcccccataacctgtgcctctctccttccagccaggaagtcctcttcttgagaagttagcttcccgggctgccagcactcatagccgtcccctcctgcttgtgttggctccaggctcgggtgctaagaagatgtgtgtctgtcctggagatcagtgtgttgttatgtgtccacgtgggcccacaagtgcacggcacaggcatggccgtgtggctgtgttggctgtgttggctgtgtgtctgtgtgcacgtccagcgcctccatgcgcatgcgtgcctgtcttgtttgcgtgtctgatcatctgtttgggccccggtggctcatgcagatgcctgtctcaggcccatggcgagtgttcacctcagctggcttccctggcaggttgggaggtgggaaacaggagcgcttaggggctgggctctggctggggtaaattatagagccagaaacacaatgaggccataggcagcagctggagcctgggctgcctgtgccgtcccctcctgccctgcccctgggtcctgcaccccctcccacctccaggctagctgacagcgctatggagcacagtggaagggactggaggaaccctaggcagggggccacgcagggacagagtatgagagtgtgtgtataactgaggctgggacattgaatcatgccaggtatgtcttctccatcagcccactcttactcctggcctgggcatctcacacatctgtgcataggaaatctcttcttccctggggtctgtgtgcagcacctagtagatgctcaataaatgtttgtgtgagggaaggagacaggaaaggaagtgtctcgctgatcatcttgcggaatggttcctaagacctctgcccaggaaagattccacccagtgctccagcccggtcaggcagaactaggttgccagatcaagggtatctcccaaaagcttccagggcagttgggggtgggggggtggggggtagggatggggaatgcagaagcgggtgcagccagctctcccccagggtgactctggcagcacccccatcctgggcaccctgcctgctctgtggctcacgcccctcctgaagtgactgatgctctgaggcccaaggctaggtccagggcagggcctgcaggggtttcatgctcagtccaggacttgcctaggtccccctacatctgtggggcccccatctaggttctaacaggagaatcacctctccaagggggatgctgcccctcggctccccttggctctcaggaggggccctcagggactaccagtcccctgccagtgggaagaaatagccctgccctcagggagcttccagtgtgatgggggagatacagcagactgtgtcccaaagtaaaatgactgttagaatgaggtgggtggaggagggaagccttgggtgggtgtgactttgggcatctgagcctggggtgcagaggtgggctctgtgggcctgaggtggacaggagggaaccaggccctagcaagacttttgccagctagacctgctgcagcagttgggagggtgggtgctgctggagtcctgggtccatcacctagaaggctcaggccagtgcagccagggctggggcccacagctggcctgggtgggacctgccctgatgcccatggcaggagggacgcctggcccttcacaattggcttggctgctcacctttgctctcatcctcaattattaatgactggagaaagctgctaagtatcttcagaatgttagatttcaacaagatggggggttcagggtccctggcaccctggatagggagccagcggcccctagagacctttgctgtgtgcagggggtatgtgctcacccccgtggcctcagcctcctcaatgtctgaatgaaggattgggctagcagacatcccaccccacagcacactttctaaccagcaggggaacttctagacaatagagacgctgggctccctccagaacactggacctgaacttctggggggagggctgggcacgggcatattttaaaagctccccagcagatgggccgtgcagtcaagtgggccaagagtggcaccagactttggggcttgtgaagtcaggagggagcaacagtgcccactcgagcttgcctggggctcaagcccaaggctgggctgctgccagcctgagcagacacccaggagcttccaggccagctggatgcacagggcacctttgtggaactcctaggaccctggggagacccacctcaggagcagagtctcaggtcccttccggctctgaggggctgttctgagctctaatgtcttatggtctgcccctcccatccttacttctcaggccctggaggcagaggcatagagccaggcaggacagaggtctcagtgggccacatgccagctgcccccacactgcctcagcctccaggcctccaaggggtcctggggagcccctgagaagatgctgagcctgcataaggctgggcgcccctctttctgacaccctcactggctccacggctcccccttcccatcccaggtttccatctgcccactgaacagggaggggaaactgaggcactcccctggcactgagggctccttctgtcatcctgcctgccctggatggtcctggctgcccctcagggcttggccctggcactgtgagcctcacagggctcagacccccacccccaacccagcactaaatggcactcggcaccagaatctcacttcagttggcaaaagcagcaattagcatgtaatgaggcttcttgctttatttttaggtaacctccaaggccctgcctgtgtaattcagcccgccattgctcggtggataattaaagcatgtcaccataa

SEQ ID NO: 469 - protein, 712 aa, Homo sapiens; identical to SEQ ID NO: 440

SEQ ID NO: 470 - DNA, 5346 bp, Homo sapiens
  source 1..5346: mol_type = other DNA
atgggacccaggcaggactccgcagtggtgcaccatctgggcatcgacagctcctcggtgtcggccccaccttgagccccagttccaccttctaccgcttcagcacctccggcgcggacagctcctcgctgtcgcctccactcccggccctgggccggacccgggagcagacgctcctcggcgcccgctcacggggacgagtcctgctccctgctatcccagacccctttctctggcgcatggagaacctgggggtcggcgaaggggcagaggcttgcagcaggttgagtcgctctcgcggccgccacagcatgaccagagccccgaagcacctgtggcggcaaccccggcgccccatccgcatccaacagcgcttctattcggatccggacaagtccgcgggctgccgcgagagggacctgagcccgcggccggagctcaggaagtcgcggctctcctggcccgtttcctcctgcaggcgctttgacctggaaaatgggctctcgtgtgggaggagggccctggaccctcagtccagccctggcctgggccggattatgcaggctccagtcccgcacagccagcggcgcgagtccttcctgtaccgctcagatagcgactatgaactctcgcccaaggccatgtctcggaactcctctgtggccagcgacctacatggagaggacatgattgtgacgccctttgcccaggtcctggccagtctgcggaccgttcggagcaacgtggcggcccttgcccgccagcaatgcctaggagcagccaagcagggacccgtcggaaacccttcatccagcaatcagctccctcctgcagaggacacggggcagaagctggcattggagacgctagacgagctggactggtgcctggatcagttggagacgctgcagacccggcactcggtgggggagatggcctccaacaagttcaagcggatcctgaaccgggagttgacccacctgtccgaaaccagccgctccgggaaccaggtgtccgagtacatctcccggaccttcctggaccagcagaccgaggtggagctgcccaaggtgaccgctgaggaggccccacagcccatgtcccggatcagtggcctacatgggctctgccacagtgccagcctctcctcagccactgtcccacgctttggggtccagactgaccaggaggagcaactggccaaggagctagaagacaccaacaagtggggacttgatgtgttcaaggtggcggagctaagtgggaaccggcccctcacagctatcatattcagcatttttcaggagcgggacctgctgaagacattccagatcccagcagacacactggccacctacctgctgatgctggaaggtcactaccacgccaatgtggcctaccacaacagcctacatgccgccgacgtggcccagtccacgcatgtgctgctggctacgcccgccctcgaggctgtgttcacagacttggaaatcctggctgccctctttgcaagcgccatccacgacgtggaccatcctggggtctccaaccagtttctgattaacaccaactcagagctggcgcttatgtacaacgacgcctcggtgctggagaaccatcacctggctgtgggcttcaagctgctgcaggcagagaactgcgatatcttccagaacctcagcgccaagcagcgactgagtctgcgcaggatggtcattgacatggtgctggccacagacatgtccaaacacatgaacctcctggccgacctcaagaccatggtggagaccaagaaggtgacaagcctcggtgtcctcctcctggacaactattccgaccgaatccaggtcttgcagaacctggtgcactgtgctgatctgagcaaccccaccaagccgctgcccctgtaccgccagtggacggaccgcatcatggccgagttcttccagcagggagaccgcgagcgtgagtcgggcctggacatcagtcccatgtgtgacaagcatacggcctcagtggagaagtcccaggtgggtttcattgactacattgctcacccactgtgggagacttgggctgacctggtccacccagatgcacaggacctgctggacacgctggaggacaatcgagagtggtaccagagcaagatcccccgaagtccctcagacctcaccaaccccgagcgggacgggcctgacagattccagtttgaactgactctggaggaggcagaggaagaggatgaggaggaagaagaggagggggaagagacagctttagccaaagaggccttggagttgcctgacactgaactcctgtcccctgaagccggcccagaccctggggacttacccctcgacaaccagaggacttagggccagccctgcgtgaactgcaggggcaatggatggtaaagccctttggctcttggcaggcagactttccaggaagaggctccatgtggctcctgcttcactttcccacccatttagggagacaatcaagctcttagttataggtggctcccagggtctaattggaggcacctggctggggtccactctgaccctagacttgcctaaaagagctctctaaggggcagcctcttacgatgccctggtgtctttctcctgggcttctatccctgtgaggagaggtgctgtctgctggagcctctagtccaccctctccagtggtcactcttgagtcacatctgtcacttaattatttccttctttatcaaatatttattgctcatctacttcgtgccagctttctgcctctgtagtagccctgcacaaagggtggggagtcaggagaccatcccaaaggcatctccctgtcttcctctaccaagcggctctctgcaagagcatggaaatgtgagtggggaaaattttcagcaccaaagcttcactcatacccagttttgtttctgaaactacggtagggggcaggaagaggagcagaaaagaagggctgggcaaggcatagtggcttatgcctgtaatcccggtactttgggaggctgaggtgggaggactgcttaagctcaggagtttgagaccagcctgggcaacatagcaagacccccaccatctctgaaaaaaaaaattagccaggcatggtggtgtgcacctgagaatcccagctactcagaaggttgagacaaaggggatcgcttgagcccaggagttggaggctgaagagagctatgactgcatcactgcactccagcctgggcaacacagcaagatcctgtctaaaaataaaaagaaaagagaaggaaaggaaagagacggggctctgaggccgagcacagtggcccatgcctataatcccagcactttgggaggctgaggcaggtggatcacctgaggttaggagttcgagaccagcctggccaacatggtgaaaccccatctctactaaaaatacaaaaattggctgggcatggtggcgggtgcctgtaatcccagctactggggaggctgaggcaggagaatcacttgaattcaggaggtggaggttgcagtgagccgacatcatgccactgcactccagcctgggcgacagagcaagacactgtctcaaaaaagaaaagaaaaaaaaaaaagccgggccaggtggctcacgcctgtaatcctagcactttgggaggctgagtgggggtggatcgcctgagatcaggagttcaaaatcagcctggccaacatagtgaaaccctgtctctactaaaaatacaaaaaattagaggctgggtgcggcggctcacacctgtaatcccagaactttgggaggccgaggcgggtggatcacgaggtcaggagttcaagaccagcctggccaacacggtgaaaccccatctctactaaaaatacacaaattagctgggcatggtgttgggtgcctgaatcccagctactcgggaggctgaggcaggagaatcgcttgaatccgggaggcggggcttgcagtgagccgagatcgtgccattgcactccagcctgggtgacagagcaagactccgtctcaaaaagaaaaaaaaaaaattagccaggcatggtggcaggtgcctgtaatcccagctacttgagaggctgaggcaggagaatcgcttgaacccgggaggtggaggttgtggtgagccgaggtcgcgccactgcactccagcctgggcaacgacaacaacaataaaaagagggggctctgtgcccggcatgtctctgaagactgattgaacctatgcaccagttgttgctttaagtcgctttattttctgtctttggtgtctctggatgtaggagccccctgctttctctgtccgcagaactccatactgggtcccctacgtgttcctccttccctaggacagcaacaaaaacacacaattttccctctctagcaggtctctaagtctcctgattcctgaaactgcctcagactccccctagagggagggaggcccctgaggctttcttgccatcatagcctcttctgggcctcagtttcccctctgtaacctgatcctagtacttggataaactccgacgaggtgtggggggttgttgtctgtgacctccctgaaatatcttagacatttggggtactgagcatttatctggggttaaataaaatctttacatcttaagacattcgattgaccaaattgagtgtcctggccatttcactgatgaggaaactgaggcgcagagaggtcctcttgccagctcaaagtcaagcatctgggcgcccaatgttagccagcggcaccccctggtggcgggcgtgggagacacggcggggcgcgcttgtcgggggttggggggtgggtcggaggggtggcatcctccagccctgatggtcccacttaccgcacctcgccgggaagagctcgtcctgctggtcgggcctccgagcggactgggcagcaccatgctcaagcctagggttcgatccccgcctccggaagcctcagtatccatccctcccctctgcctccctcttcgcgtgcctgaatatttatacaagatacaggcgtcatcacagccgccctcggcttccagagcagctggcttcgttcataaatattataaccactcagaattcatcatcatcacagttaatgataaaattccacagtgccagaactaaaagtcatccgggttcacgaacttggtgcatttccttccagacttttaaaaagaagatatttagggaatttttttttcaagatttttccccccagtccgcttacaaagtaataccatgttcgctgtaaaaaatttggaaataatggaaatgtataaagaaggaaataaaattctgctgtatctccaccca

SEQ ID NO: 471 - protein, 640 aa, Homo sapiens
MELEVPDEAESAEAGAVPSEAAWAAESGAAAGLAQKKAAPTEVLSMTAQPGPGHGKKLGHRGVDASGETTYKKTTSSTLKGAIQLGIGYTVGHLSSKPERDVLMQDFYVVESIFFPSEGSNLTPAHHFQDFRFKTYAPVAFRYFRELFGIRPDDYLYSLCNEPLIELSNPGASGSLFYVTSDDEFIIKTVMHKEAEFLQKLLPGYYMNLNQNPRTLLPKFYGLYCVQSGGKNIRVVVMNNILPRVVKMHLKFDLKGSTYKRRASKKEKEKSFPTYKDLDFMQDMPEGLLLDADTFSALVKTLQRDCLVLESFKIMDYSLLLGVHNIDQHERERQAQGAQSTSDEKRPVGQKALYSTAMESIQGGAARGEAIESDDTMGGIPAVNGRGERLLLHIGIIDILQSYRFIKKLEHTWKALVHDGDTVSVHRPSFYAERFFKFMSNTVFRKNSSLKSSPSKKGRGGALLAVKPLGPTAAFSASQIPSEREEAQYDLRGARSYPTLEDEGRPDLLPCTPPSFEEATTASIATTLSSTSLSIPERSPSETSEQPRYRRRTQSSGQDGRPQEEPPAEEDLQQITVQVEPACSVEIVVPKEEDAGVEASPAGASAAVEVETASQASDEEGAPASQASDEEDAPATDIYF

SEQ ID NO: 472 - DNA, 4985 bp, Homo sapiens
  source 1..4985: mol_type = other DNA
ggcggcgcttgttgttcggcggcggcggtcgcagctcgggtccccctcgggcgcccccgccgccgtccgcgcgcggccatggagctggaggtaccggacgaggcggagagcgctgaggcgggggccgtgccctcggaggcggcgtgggcggcagagagcggggcggcggcaggtttggctcagaagaaggcggccccaacagaggttctgtccatgacggcacagccgggccctggccatgggaagaagttgggccatcgaggtgtggacgcatccggcgaaaccacctacaagaagaccacctcctccaccctgaagggtgccatccagctgggcatcggctacaccgtgggccacctgagctccaagcccgaacgcgacgtgctcatgcaggacttctacgtggtggagagcatcttcttccccagcgaaggcagcaacctcacccccgcccaccacttccaggacttccgcttcaagacctatgcacctgtcgccttccgctacttccgggagctctttgggatccggccagatgattacttgtactccctgtgcaatgagccgctgatcgagctgtccaacccgggcgccagtggctccctcttctacgtcaccagcgacgacgagttcatcatcaagaccgtcatgcacaaggaggccgagttcctgcagaagctgctccctggctactacatgaacctcaaccagaacccgcggacgctgctgcccaagttctatgggctgtactgcgtgcagtcggggggcaagaacatccgcgtcgtggtcatgaacaacatcctgccccgcgtggtcaagatgcacctcaagttcgacctcaagggctccacctacaagcggcgcgccagcaagaaggagaaggagaagagcttccccacctacaaggacctggacttcatgcaggacatgcccgaggggctcctgctggacgccgacaccttcagcgccctggtcaagacgctgcagcgggactgcctggtcctggaaagtttcaagatcatggactacagcctgctgctgggcgtgcacaacatcgaccagcacgagcgcgagcggcaggcgcagggcgcccagagcacctcagatgagaagcggcctgtgggccagaaggcgctctactccacggccatggagtccatccagggtggcgccgcgcgcggggaggccatcgaatcggatgacacgatgggcgggatccccgctgtgaacggccgcggggagcggctgctgctgcacattggcatcatcgacatcctgcagtcctacaggttcatcaagaaactggagcacacctggaaggccctcgtccacgatggggacacggtgtccgtccaccgccccagcttctatgccgagcgctttttcaagttcatgagcaacacggtctttcggaagaactcctccctgaagtcctcgccctccaagaaggggcgcggcggagccttgctagctgtgaaaccgctggggcccaccgctgccttctcggccagccagatccctagcgagcgggaggaggcccagtacgacctgcggggggcccgcagctaccccacgctggaggacgaaggccggcccgacctcctgccctgcacgccaccttctttcgaagaagccactacagcctccattgccacgactctgtcatccacatccctctccattcctgagcggtccccctcggagacgtcggagcagccgcggtacaggcggcgcacacagtcgtctggacaggatggcaggccgcaggaggagccacccgcggaagaggatctgcagcagattacagtgcaggtggagcctgcgtgcagcgtggagattgtggtccccaaagaggaggacgcaggggtggaggcttccccggccggtgcctctgctgctgttgaagtagaaactgccagccaggcctcagacgaggagggcgcacctgccagccaggcctcggacgaggaggacgcgcccgccaccgacatctacttttaatttctatgcagcccccgacccagagccgagctccacttctgctccggctgcccccgaaggcgctgcccaccccgctgaggcccagagctcgggagatgcccgcctcgccgccccaccggacctcgtcctccccctgcacggatgccgacggccgggcccctccccgacaagcctcccagggccccggcaccccggtcggcagcctgcccctgtgagacccaccctcccgagcggccaatcgcatttgagtccttatttggcacagagacggaagcacgtgtgtgccgttttaggaaaagaacaaaaaagacacaaacaaaccaaccagagggagaagagcccctgcccactgcactctttggttctctgctgtgcctgcctgtgtcctgaggaagaagccaggctgttcgcggtggcctctggggacctgagccccgggggccccatcggcctgcagaggggacggctggggtcccgagcaactctgcctccatccacgtgggaagcggaccctcctgccctcagcttgggtttgggggcctcagtgcaggacatctggcctgaacatcgactgtggggacagccctcgccctgccaagcactgcggccactcagcagctatgttcccgccgcagtggggccctgacgcccacctcccaggtgcccctcgagcaaaaacctctggcgcctccaatccagacccaccacagctggagggccaggcctcctcttccccaggctgccacccacgctggcggagctcagggctggggacttgtccttctcttccaacgtaggccactcagcaactggcatggagggcccaggcaacggagacgttttctccatggcaggacagagcgggaggccgggccttgggccacaggagaccagctcagggcggaaggtcaggctccccgccccctccacgtggagacatggcctagggggccaggcccggctccacaggagtctccttcaggactggtgtggatgtccgccgcctctttcttgtttaagtgatgtgatgtctccgaggaggggagagaagactttgtttccgactcatcaccctccaagagggcagcgctcccagtggtgggactcagcccagactgccctggggcagcttcctgggcccgctgcgctcagagggtgctggttggaggccagagctcggcagagtcacccaccctgcccttccccaggacccctgagaggggcttattggtgatggctgtgggaatcccccacttccaagatgtgcccaggatgtgaggagctggagtggaagctgcacctttgggaagaattcctctccagacctggcagagcctggtgtggggtctgagacggccggagaacctcccaggcagggctctgtgttttgtctgttacaacctccgtatgacgccacgccacccgctgttcacgtcccgtcggcctcctgcacagcccacacgctgcgcccggaaggcccctgctgtggagaagccggacccatccccgaggtccccagcgaggacacacactccacgagagcagcccctccactctgcccaggagaggggccgaccctcctcgggaaccggccagccgcgtggctcccagcatccatcaggacaagcccacgtggggtcctccctgcgtgctcagagggtctgtccagccctgggaagcgaccttggcctcagttcacagcctggtgctcatctgctggcaccgggcatccacccatcagcccccgccctgtccctccgaaggacacccagcaggcaccccccggggaggcaggggcagaggtcagaaggggtgtctgggacctggatggccagcagggacaggggcattgtcatctcaaaggcccaacccccagaggccacaccagtcctcccagggagtcctcgagtcgccctgcccagagccctggcaccagagacgccaagagcctgtggggtgactcggagcagcaggtgtggccccgggcgggcggcaccgcgtccagggcagcctccctccgctgagtgacacgggacaccagtgcccggccgacgcgcctttgcaggagaaatgtgcaaacctctgtggataccatttcatttccattcttgtgttgtctccaaggcccttttggagatatacttggtgttggttgtgttttttggttccttttcagagaactgtaaaccgaggctgacgtgctccactgactgtgccgaggggcgggggcaggaggacggcaagacctatttataatatttagcgaactcggtctccctcagatcccccgcgagggaggctgctggacccaccccgctgtcccccatgatagaagtctgtaaataccttggtgaccaatgcccacttcccctcctgggtcacctctgatggctgctgtccactgagaacgtgggcagtgtccaaattcctgtactgtaaagactaaaaggcgtttgctctgagactgacaaggcggaaacttccatgtgtctcctgccaggctctgtccccctacgccatcccgacacgtccccgttcccccgaaacctggctcagtgcaatactcccattgccatggggtccttcaccatggtactgtctccacagccctcagtccccaccccaggagaggcgcctgccacctcctcctcatctccggtggttcaatcgctccgcctgtccccaacccagtcccatttttatggccaaactgattctgaaacaaaatgaaactgcaaacctcgtgtgtcttaactccccccagggatgccactccattcctccgccccgtggtctggtgcgtgacaatccaaagcgccgagacgagggtgctgtgtccctcaaacccagagtggtgggcgcctctgaaaccatacagccactcctggccccaaacactggtttgcatcccaggttcctcgcccacctacccccgccacaccccgtctttttagagatctctctaataaatcgggtaataagca

SEQ ID NO: 473 - protein, 333 aa, Homo sapiens
MESSGNPESTTFFYYDLQSQPCENQAWVFATLATTVLYCLVFLLSLVGNSLVLWVLVKYESLESLTNIFILNLCLSDLVFACLLPVWISPYHWGWVLGDFLCKLLNMIFSISLYSSIFFLTIMTIHRYLSVVSPLSTLRVPTLRCRVLVTMAVWVASILSSILDTIFHKVLSSGCDYSELTWYLTSVYQHNLFFLLSLGIILFCYVEILRTLFRSRSKRRHRTVKLIFAIVVAYFLSWGPYNFTLFLQTLFRTQIIRSCEAKQQLEYALLICRNLAFSHCCFNPVLYVFVGVKFRTHLKHVLRQFWFCRLQAPSPASIPHSPGAFAYEGASFY

SEQ ID NO: 474 - DNA, 5039 bp, Homo sapiens
  source 1..5039: mol_type = other DNA
aagtgaaatatgaaacagagaagcaccatttctgcctcaagacgcatgtaaagaggtgtagattcagatgctctaaacgtccctgccatctggtccagatggagtcctcaggcaacccagagagcaccacctttttttactatgaccttcagagccagccgtgtgagaaccaggcctgggtctttgctaccctcgccaccactgtcctatactgcctggtgtttctcctcagcctagtgggcaacagcctggtcctgtgggtcctggtgaagtatgagagcctggagtccctcaccaacatcttcatcctcaacctgtgcctctcagacctggtgttcgcctgcttgttgcctgtgtggatctccccataccactggggctgggtgctgggagacttcctctgcaaactcctcaatatgatcttctccatcagcctctacagcagcatcttcttcctgaccatcatgaccatccaccgctacctgtcggtagtgagccccctctccaccctgcgcgtccccaccctccgctgccgggtgctggtgaccatggctgtgtgggtagccagcatcctgtcctccatcctcgacaccatcttccacaaggtgctttcttcgggctgtgattattccgaactcacgtggtacctcacctccgtctaccagcacaacctcttcttcctgctgtccctggggattatcctgttctgctacgtggagatcctcaggaccctgttccgctcacgctccaagcggcgccaccgcacggtcaagctcatcttcgccatcgtggtggcctacttcctcagctggggtccctacaacttcaccctgtttctgcagacgctgtttcggacccagatcatccggagctgcgaggccaaacagcagctagaatacgccctgctcatctgccgcaacctcgccttctcccactgctgctttaacccggtgctctatgtcttcgtgggggtcaagttccgcacacacctgaaacatgttctccggcagttctggttctgccggctgcaggcacccagcccagcctcgatcccccactcccctggtgccttcgcctatgagggcgcctccttctactgaggggcctgtggcggtgcaggcgcaggtgcaggtggacagggactggaatgggggtcatggagaagcgggcctggaaggagcattgcagaacacagcagggtggagacgtctcctccgctgcaggcgtgcagtgaaggtcattcattacaccagtgggtcccgccagcctctcatctgcgggaaagtggcttcctacctgggaattttatactgccatccaaaaaaacatttcttgaactctgagttcatcttgcacgctccttcatttagacatgtgtttctaatcactgtttagttcagaaggttctaagacatgaaaggattctgggaaaggtgcttccttggagactttacagggcctaaagctcattgtgataactgcacgatgctgacaagacaatgcctcccttccctgactgtaaggttgtccctactggtttattcactttggaggcgcctggctccgtattcctcaggtactgctggatgaggctgtctggaagacaaaagtcgccataccctgagataagcagtcatgttgatatctggattctaaaaatccacaactagactggagaaatgttctgtatcctggattcaagtcctagcccacgaactggcccttaaaaatttagctcataaatatttgattgaaggaatgaatttaataagtgctaccttctgcactaagtatttattcagagaatacaaagatgaatgagatacagttgctaccctccaggggccaacagcccagctccaaaggctcacctaccttggtgaacacccaccttggtgaaggcatctagggtggactcctccgacatctcatccttcccaggtggatagtgagctgacttcacatttatcactttgtacctaaagtgtcctcctcctatttggttgatggtggtagctccccccacccacccacactccaaacctcaagtcctcttggaggcctgtgttttcttttcctcaactcccacagccaggtccaaatgactatgcctgtctagtggctttcagagttgactcattcttgccattgcatgcccatggtttcatccctgaaacagggcctcacttccttggcatctccccactgctcctctctttccccaccaggctgttctctgcccttacaccaggtgcttcaaaacccttagtggctcctcattacttacaaatgaagtccatacactttagcaaggctttcaaggcctccacaatccgatgccagccaacttttccattcttattccactctaagcctcctccccacagcagcttgggatccaaccccaaaacaccactggccttctttcagacacatatctccccagtaccctacctctaggcatttgtcatgctgtcacctgggcctggaacatgttctagctgacaggccagcttctccaggaagccctccctaatctgcaaattagaacattctctgggttgtcgtgggattctgcttgtcccctctaaaataaaacaaccttgtgttgtagttacacacatgcaatgtcttatctccctgccccatcaggctgcaagcttcttgagggcaggaacctggtcttgaaccccagtgttctatcactgtgtgctcagtgggagcaaagaatcaacagctgttattatccttcagatttatgcttcttggggagccatgccctggggcacactttaccttctttgtcccaggctgcttctctataaatattaacctttctttcctagtctacactctcagagagtagtagaaagagagtagggtgtagtagtagagagattgcttatctctctctgtggcgatggctatgcttcaccttgccttctagttcatggtacgcatccctgcctctcacactggcccattgcttcacacccaagggcataaataaaagccactctctaaactttgccatgccacaaagacctgggcccaatctgtgaacctgatttggctctggcgtggggatttggaaaagcttcccatgcgattctgacatgcaccttcattaggtacatttggctgcaacttttttaaaaaatgaggagtccagagtcttctacagtcccttgagcagggatttgcacacagaagacactcaatatcttgttattgaataaagtagataccaatgtagccctctggccaacctagagagagcttgtaaggcatttccccttcagttccagatgcaacttcaatgatctatttgccaatggggcagtagatctggaggagtttatcggtctagggaagagccagggcctagttttaataatgaggccagtagcacctgctggacagggctgggcggcataccagtgaagggaaggggctcccatggacctacctgccagcctacaggtggggccactactcaccaccgatgggagaaacagcataaggaagagataatgaggtagtttgtggtatcagagctaagcctatgggcttctagttggcctaatctttcaaacacagtttcacactgattcttaacattttgttcaacttttactcagagggcaggctgagccagggagcaaaaaggcaaaggactcctactcacatacccacttagcaaaaccaaagcaccttgggctttgaacccacccttcttagaaggcaggtttgggggttgaggccccttgagaagctcacttcaccctctccccatgccatcccattcctacccatcccaagatgcttctcttgtatttctttcagcacatccagccatctccctgggagcgtttcatatctgactctttatacttccagtgatgttttggcatccctaatagactggctcccaaggcagtctttaatcaggagtcttcccctaatctagctcctcaagaacccaagggaagaggcacaaagagaagtatgaataggaagatagaagggtaacccagtcagagagggagtggcagatgacactgctgaaaaggagtttccagagagttgcacaccatgagccacgctgtctgtccctgaccacaacctccactggccaccacctcctgggcttcccctccctccacccacagaaaccattgctcaatctcaactggactcttgcaggcctatctctccctccaaacagagatgtcctggacacagagctgcagacctctaaccactcctggaacataaaaaaacccacggtggttctacagcatttacacctccagtttccctcagacagaatccagaagagaagaacctcgctgatctctgagcggagcatgtctccaagctcaggccagccccagaactccaatggcctcaactggagtggaaatccctcaaaggcacaaacccagttcctaccatctccctcagtgcctggcaatgtttgtggttggttgagtgagttaacaggagaccatcttttggccttttttctacctctgttttctcttactatacttgcctacatctcatcttctggtcaacaccaggtactcaccccatgagcttcttgtgaacttgtctggggcccaccggcctaaacatcatcttttttgtttggaattaagctttgttgaacttttcacaggtttcatttatgcaaatgcctgtgatgggacaaaaaggtctgcaaacatggaaacctggtctaaagatgtccaaagtaaactgtctgtggagtcgaatgacatttgagccctggacctaaactccaaatccaagctctttcccactgtgaccttgggcctctcaaggctcagtttcctcacctataaactgtagagaagccaataacagactcatccacactatgaggctgtgcataaggtcatgtatgtaaaactacttgctttgttgatcattctgtcccagataagtatgaattattatgcatcatttcattaaacaagaaagcttcactgtgttaatatgcacaagtaaaa

SEQ ID NO: 475 - protein, 1528 aa, Homo sapiens
MSVAIRKRSWEEHVTHWMGQPFNSDDRNTACHHGLVADSLQASMEKDATLNVDRKEKCVSLPDCCHGSELRDFPGRPMGHLSKDVDENDSHEGEDQFLSLEASTETLVHVSDEDNNADLCLTDDKQVLNTQGQKTSGQHMIQGAGSLEKALPIIQSNQVSSNSWGIAGETELALVKESGERKVTDSISKSLELCNEISLSEIKDAPKVNAVDTLNVKDIAPEKQLLNSAVIAQQRRKPDPPKDENERSTCNVVQNEFLDTPCTNRGLPLLKTDFGSCLLQPPSCPNGMSAENGLEKSGFSQHQNKSPPKVKAEDGMQCLQLKETLATQEPTDNQVRLRKRKEIREDRDRARLDSMVLLIMKLDQLDQDIENALSTSSSPSGTPTNLRRHVPDLESGSESGADTISVNQTRVNLSSDTESTDLPSSTPVANSGTKPKTTAIQGISEKEKAEIEAKEACDWLRATGFPQYAQLYEDFLFPIDISLVKREHDFLDRDAIEALCRRLNTLNKCAVMKLEISPHRKRSDDSDEDEPCAISGKWTFQRDSKRWSRLEEFDVFSPKQDLVPGSPDDSHPKDGPSPGGTLMDLSERQEVSSVRSLSSTGSLPSHAPPSEDAATPRTNSVISVCSSSNLAGNDDSFGSLPSPKELSSFSFSMKGHEKTAKSKTRSLLKRMESLKLKSSHHSKHKAPSKLGLIISGPILQEGMDEEKLKQLNCVEISALNGNRINVPMVRKRSVSNSTQTSSSSSQSETSSAVSTPSPVTRTRSLSACNKRVGMYLEGFDPFNQSTFNNVVEQNFKNRESYPEDTVFYIPEDHKPGTFPKALTNGSFSPSGNNGSVNWRTGSFHGPGHISLRRENSSDSPKELKRRNSSSSMSSRLSIYDNVPGSILYSSSGDLADLENEDIFPELDDILYHVKGMQRIVNQWSEKFSDEGDSDSALDSVSPCPSSPKQIHLDVDNDRTTPSDLDSTGNSLNEPEEPSEIPERRDSGVGASLTRSNRHRLRWHSFQSSHRPSLNSVSLQINCQSVAQMNLLQKYSLLKLTALLEKYTPSNKHGFSWAVPKFMKRIKVPDYKDRSVFGVPLTVNVQRTGQPLPQSIQQAMRYLRNHCLDQVGLFRKSGVKSRIQALRQMNEGAIDCVNYEGQSAYDVADMLKQYFRDLPEPLMTNKLSETFLQIYQYVPKDQRLQAIKAAIMLLPDENREVLQTLLYFLSDVTAAVKENQMTPTNLAVCLAPSLFHLNTLKRENSSPRVMQRKQSLGKPDQKDLNENLAATQGLAHMIAECKKLFQVPEEMSRCRNSYTEQELKPLTLEALGHLGNDDSADYQHFLQDCVDGLFKEVKEKFKGWVSYSTSEQAELSYKKVSEGPPLRLWRSVIEVPAVPEEILKRLLKEQHLWDVDLLDSKVIEILDSQTEIYQYVQNSMAPHPARDYVVLRTWRTNLPKGACALLLTSVDHDRAPVVGVRVNVLLSRYLIEPCGPGKSKLTYMCRVDLRGHMPEWYTKSFGHLCAAEVVKIRDSFSNQNTETKDTKSR

SEQ ID NO: 476 - DNA, 7412 bp, Homo sapiens
  source 1..7412: mol_type = other DNA
agtctgaatttagtagacagaagtcactaggaatgccttgacaggatcctgccttagctaaggctccctccagctgcagagggtgtttttgttagactcacacactgcgtgaaactgctcagaatagagccatgatctcaaccacgaaatgggaacttagattttggagaaactaacggggacggacttctttcctagcctgagtgttgagcagtgtcatgccttggcgtttcagctcctcgttgtctaggtggtgaaatgacagaactcattcgcttctttgattggtgattttgaaataatctttcatcaagttccatctcctttaccctcatatggaatatatctctctgtctgttgttaaactacgatgacatgtctgtagctatcagaaagagaagctgggaagaacatgtgacccactggatgggacagccttttaattctgatgatcgtaacacagcatgtcatcatggactagtagctgacagcttgcaggcaagtatggaaaaagatgcaactctaaatgtggaccgcaaagagaagtgtgtttcactacctgactgctgtcatggatcagagctgagagattttcctgggaggccaatgggtcatctttcaaaggatgtggacgaaaatgacagccatgaaggtgaagatcagtttctttctctggaagccagcacagaaacactagtgcatgtttctgatgaggataacaatgctgatttatgccttacagatgataaacaggttttaaatacccaagggcagaaaacatcaggccaacatatgatccaaggagcaggctccttagaaaaggcactgcccatcatacaaagtaaccaagtttcttctaactcctggggaatagctggtgaaactgaattagcactggtaaaagaaagtggggagagaaaagttactgactctataagtaaaagcctggagctttgcaatgaaataagcttaagtgaaataaaagatgcacccaaagtaaatgcagtggatactttgaacgtgaaagatattgcacctgagaaacaattgcttaactctgctgtaattgctcagcaacgaaggaaacctgacccccctaaagatgaaaatgaaagaagcacctgcaatgtagtacaaaatgagttcttggatactccttgcacaaacagaggactgccattattaaaaacagattttggaagctgccttctgcagcctccttcctgccccaatggaatgtcagctgaaaatggcctggagaagagtggtttttcacaacatcaaaacaaaagtccaccaaaggtcaaggcagaagatggcatgcagtgtttacaattaaaggagaccctggccacccaggaacccacagataaccaagtcagacttcgtaagagaaaggaaataagagaagatcgagatagggcgcggctggactccatggtgctgctgattatgaaactggaccagcttgatcaggacatagaaaatgccctcagcaccagctcctctccatcaggcacaccaacaaacctgcggcggcacgttcctgatctggaatcaggatctgaaagtggagcagataccatttcagtaaatcagacacgagtaaatttgtcttctgacactgagtccacggacctcccatcttccactccagtagccaattctggaaccaaacccaagactacggctattcaaggtatttcagagaaggaaaaggctgaaattgaagccaaggaagcttgtgattggctacgggcaactggtttcccccagtatgcacagctttatgaagatttcctgttccccatcgatatttccttggtcaagagagagcatgattttttggacagagatgccattgaggctctatgcaggcgtctaaatactttaaacaaatgtgcggtgatgaagctagaaattagtcctcatcggaaacgaagtgacgattcagacgaggatgagccttgtgccatcagtggcaaatggactttccaaagggacagcaagaggtggtcccggcttgaagagtttgatgtcttttctccaaaacaagacctggtccctgggtccccagacgactcccacccgaaggacggccccagccccggaggcacgctgatggacctcagcgagcgccaggaggtgtcttccgtccgcagcctcagcagcactggcagcctccccagccacgcgccccccagcgaggatgctgccaccccccggactaactccgtcatcagcgtttgctcctccagcaacttggcaggcaatgacgactctttcggcagcctgccctctcccaaggaactgtccagcttcagcttcagcatgaaaggccacgaaaaaactgccaagtccaagacgcgcagtctgctgaaacggatggagagcctgaagctcaagagctcccatcacagcaagcacaaagcgccctcaaagctggggttgatcatcagcgggcccatcttgcaagaggggatggatgaggagaagctgaagcagctcaactgcgtggagatctccgccctcaatggcaaccgcatcaacgtccccatggtacgaaagaggagcgtttccaactccacgcagaccagcagcagcagcagccagtcggagaccagcagcgcggtcagcacgcccagccctgttacgaggacccggagcctcagtgcgtgcaacaagcgggtgggcatgtacttagagggcttcgatcctttcaatcagtcaacatttaacaacgtggtggagcagaactttaagaaccgcgagagctacccagaggacacggtgttctacatccctgaagatcacaagcctggcactttccccaaagctctcaccaatggcagtttctccccctcggggaataacggctctgtgaactggaggacgggaagcttccacggccctggccacatcagcctcaggagggaaaacagtagcgacagccccaaggaactgaagagacgcaattcttccagctccatgagcagccgcctgagcatctacgacaacgtgccgggctccatcctctactccagttcaggggacctggcggatctggagaacgaggacatcttccccgagctggacgacatcctctaccacgtgaaggggatgcagcggatagtcaatcagtggtcggagaagttttctgatgagggagattcggactcagccctggactcggtctctccctgcccgtcctctccaaaacagatacacctggatgtggacaacgaccgaaccacacccagcgacctggacagcacaggcaactccctgaatgaaccggaagagccctccgagatcccggaaagaagggattctggggttggggcttccctaaccaggtccaacaggcaccgactgagatggcacagtttccagagctcacatcggccaagcctcaactctgtatcactacagattaactgccagtctgtggcccagatgaacctgctgcagaaatactcactcctaaagctaacggccctgctggagaaatacacaccttctaacaagcatggttttagctgggccgtgcccaagttcatgaagaggatcaaggttccagactacaaggaccggagtgtgtttggggtcccactgacggtcaacgtgcagcgcacaggacaaccgttgcctcagagcatccagcaggccatgcgatacctccggaaccattgtttggatcaggttgggctcttcagaaaatcgggggtcaagtcccggattcaggctctgcgccagatgaatgaaggtgccatagactgtgtcaactacgaaggacagtctgcttatgacgtggcagacatgctgaagcagtattttcgagatcttcctgagccactaatgacgaacaaactctcggaaacctttctacagatctaccaatatgtgcccaaggaccagcgcctgcaggccatcaaggctgccatcatgctgctgcctgacgagaaccgggaggttctgcagaccctgctttatttcctgagcgatgtcacagcagccgtaaaagaaaaccagatgaccccaaccaacctggccgtgtgcttagcgccttccctcttccatctcaacaccctgaagagagagaattcctctcccagggtaatgcaaagaaaacaaagtttgggcaaaccagatcagaaagatttgaatgaaaacctagctgccactcaagggctggcccatatgatcgccgagtgcaagaagcttttccaggttcccgaggaaatgagccgatgtcgtaattcctataccgaacaagagctgaagcccctcactctggaagcactcgggcacctgggtaatgatgactcagctgactaccaacacttcctccaggactgtgtggatggcctgtttaaagaagtcaaagagaagtttaaaggctgggtcagctactccacttcggagcaggctgagctgtcctataagaaggtgagcgaaggaccccctctgaggctttggaggtcagtcattgaagtccctgctgtgccagaggaaatcttaaagcgcctacttaaagaacagcacctctgggatgtagacctgttggattcaaaagtgatcgaaattctggacagccaaactgaaatttaccagtatgtccaaaacagtatggcacctcatcctgctcgagactacgttgttttaagaacctggaggactaatttacccaaaggagcctgtgcccttttactaacctctgtggatcacgatcgcgcacctgtggtgggtgtgagggttaatgtgctcttgtccaggtatttgattgaaccctgtgggccaggaaaatccaaactcacctacatgtgcagagttgacttaaggggccacatgccagaatggtacacaaaatcttttggacatttgtgtgcagctgaagttgtaaagatccgggattccttcagtaaccagaacactgaaaccaaagacaccaaatctaggtgatcactgaagcaacgcaaccgcttccaccaccatggtgtttgtttctagaacttttgccagtccttgaagaatgggttctgtgtctaatcctgaaacaaagaaaactacaagctggagtgtaggaattgactatagcaatttgatacatttttaaagctgcttcctgtttgttgagggtctgtattcatagaccttgactggaatatgtaagactgtgcaaaaaaaaaaaaaaaatttatgtgtattcttattcaaattgcttctgagaagcaaaactctttaaatacattatggaagataatgaagatacttcattctcttgtgatatcagtgtatgcgtacctgtgtcgctttatttgcagtgtgttgagggactggtgtatccactggaatagttggtactcttggatgtgttttctcaccaagatgagcaaagaaaggtttgcacagaggagtgtgaatgtgtgtttgttgctggctgaatggcaatagatgtctaaggtggattcagtgtctggcacactgagacacctccaagaaggagattgatgcatcaggttcagtttaacctggaatatctgactacccctgaatccacccagaaagggggcccaacacccttgtccatttatgggtattttttttcgaagttattaagcatattccttttccacgaacctcttctgtactttgattgtaataggttggctcttacacccattccaaatgcagtttatttttagacccgattgcaaatagtgatgtagttttaaccagtatggattagttcagggatgaactgctccctctagccttactggctctgatccacagggttttgttttgttttgttttgttttttgtttaagtcgagatataaaaactgaacacgataacacttactcttaaatcaagcatcaacactttttccctgttagaattctttgcatttttgtgtttgtaacagaaacgccttaagacactatgtttgggaatataggaaactatgtgtgtcccaaggaaatccctgtaaatttaactcacctacaaaaggctttttccccgcctttggttgttaacggcattcctgaaagccacatgtgtttattcattgggcttgttcttatcagcaaataggttttctggttttatgactttttgtcttattttatttttcctacatttctttttttttttttttcctttagaatgccctggaaatatatttaagtggtaatgaaaaatagtaatcatagtaaaacgcaacaagaagaaaaccaacccaaaccagtgaagttttttagaacctttagaagggtggtctttattcaggttttactgtaatggtaaggattgactcaagagacagtattagtaaatttattgtgtatggatcaaaagtgaataatgtatgaatgagagctgtaagaaggatttttattttgttataatttagttaccattttcagtgttatttcaaaggttctttgaagaattttggggcagggcatcagattagagttttaaaatttgagtattttggatatcagtgttcctcatgaagatatacatggatattcaattttgatggcttccagatttgtaagattgtatgttgtatataccattctattaagaaacatgtccactgtgctttcaaacatagataaagcatgataaagattattatttaagatatacttgtatttatacctcagatattcttttgggttttgtacctcaaggcttttttcttcttattgtaaatacactttacgtgaatacagtctaagtgaagaaaataaataaaaggaagaggtttataacttgctctatatctgtacagattataatcaataagtgcactattattaaatgtttaaagtaagggaaaagtctgggctgccttccttaatattgcatctcactcccacccttaaaaccacagattgcaaagcatagcattttagcatcaactacaatcaaaagagcgatttgctgaaggaaaaatcggactgcaaatcattccaaggccaaactgcaactgagccacccactcccaaacaggaaaccctggtgaaggttcaggaagcacggagattctctccaacaaaggtccagttaggaaacgacgctgagaggatgacgacaacgtgcaacagcagaaagatgcttgcaagcagagtcagggtcaccagtgaatgccacaaaagttctctttcccactgtttaatttgacaagagaagaatttgaaggatatgaacattttcaagaactctgctgaggtcacttagagcgccatcacaacttatttgtgtgactaattgcctagattgtaagctctttgagggcagggcttgtctcttacacatctttataatcccctgcagcggctttcagtattttgtacttgtaggcacctaataaatttattatttgctatactgaa

SEQ ID NO: 477 - protein, 524 aa, Homo sapiens
MSDNGELEDKPPAPPVRMSSTIFSTGGKDPLSANHSLKPLPSVPEEKKPRHKIISIFSGTEKGSKKKEKERPEISPPSDFEHTIHVGFDAVTGEFTGMPEQWARLLQTSNITKLEQKKNPQAVLDVLKFYDSNTVKQKYLSFTPPEKDGFPSGTPALNAKGTEAPAVVTEEEDDDEETAPPVIAPRPDHTKSIYTRSVIDPVPAPVGDSHVDGAAKSLDKQKKKTKMTDEEIMEKLRTIVSIGDPKKKYTRYEKIGQGASGTVFTATDVALGQEVAIKQINLQKQPKKELIINEILVMKELKNPNIVNFLDSYLVGDELFVVMEYLAGGSLTDVVTETCMDEAQIAAVCRECLQALEFLHANQVIHRDIKSDNVLLGMEGSVKLTDFGFCAQITPEQSKRSTMVGTPYWMAPEVVTRKAYGPKVDIWSLGIMAIEMVEGEPPYLNENPLRALYLIATNGTPELQNPEKLSPIFRDFLNRCLEMDVEKRGSAKELLQHPFLKLAKPLSSLTPLIMAAKEAMKSNR

SEQ ID NO: 478 - DNA, 6139 bp, Homo sapiens
  source 1..6139: mol_type = other DNA
gtcttcctcccccagggttgtggccacgcgcagcggcggcggttgttccgcttcccctccggcccgggccgtcgccattgccgaaggctccctcccctcccctccctggcgtgcgcaggactccgccgccgctgggcctagcggtagcagcggctgctccagcgcggcgtctcttcccgccccgcttccccttccctcccctcccctccccgcaccgcgcgctagcccggggcggctccgcagcccgccgggagctctgaccgaggcgcctcgctggggcggggaccttgccttgcccggggccatttcataattctgaatcatgtctgataacggagaactggaagataagcctccagcacctcctgtgcgaatgagcagcaccatctttagcactggaggcaaagaccctttgtcagccaatcacagtttgaaacctttgccctctgttccagaagagaaaaagcccaggcataaaatcatctccatattctcaggcacagagaaaggaagtaaaaagaaagaaaaggaacggccagaaatttctcctccatctgattttgagcacaccatccatgttggctttgatgctgttactggagaattcactggcatgccagaacagtgggctcgattactacagacctccaatatcaccaaactagagcaaaagaagaatcctcaggctgtgctggatgtcctaaagttctacgactccaacacagtgaagcagaaatatctgagctttactcctcctgagaaagatggctttccttctggaacaccagcactgaatgccaagggaacagaagcacccgcagtagtgacagaggaggaggatgatgatgaagagactgctcctcccgttattgccccgcgaccggatcatacgaaatcaatttacacacggtctgtaattgaccctgttcctgcaccagttggtgattcacatgttgatggtgctgccaagtctttagacaaacagaaaaagaagactaagatgacagatgaagagattatggagaaattaagaactatcgtgagcataggtgaccctaagaaaaaatatacaagatatgaaaaaattggacaaggggcttctggtacagttttcactgctactgacgttgcactgggacaggaggttgctatcaaacaaattaatttacagaaacagccaaagaaggaactgatcattaacgagattctggtgatgaaagaattgaaaaatcccaacatcgttaactttttggacagttacctggtaggagatgaattgtttgtggtcatggaataccttgctggggggtcactcactgatgtggtaacagaaacgtgcatggatgaagcacagattgctgctgtatgcagagagtgtttacaggcattggagtttttacatgctaatcaagtgatccacagagacatcaaaagtgacaatgtacttttgggaatggaaggatctgttaagctcactgactttggtttctgtgcccagatcacccctgagcagagcaaacgcagtaccatggtcggaacgccatactggatggcaccagaggtggttacacggaaagcttatggccctaaagtcgacatatggtctctgggtatcatggctattgagatggtagaaggagagcctccatacctcaatgaaaatcccttgagggccttgtacctaatagcaactaatggaaccccagaacttcagaatccagagaaactttccccaatatttcgggatttcttaaatcgatgtttggaaatggatgtggaaaaaaggggttcagccaaagaattattacagcatcctttcctgaaactggccaaaccgttatctagcttgacaccactgatcatggcagctaaagaagcaatgaagagtaaccgttaacatcactgctgtggcctcatactcttttttccattttctacaagaagccttttagtatatgaaaattattactctttttggggtttaaagaaatggtctgcataacctgaatgaaagaagcaaatgactattctctgaagacaaccaagagaaaattgcaaaaagacaagtatgacttttatatgaaccccttctttagggtccagaaggaattgtggactgaatcactagccttaggtctttcagcaaacagcctatcagggccatttatcatgtgtgagatttgcattttactttgctgactttgttgtaatagatcccattcattgtcccctttggggtatttccaatacttgaatggcagattggagtttttcagagtatgtgtttcatctgctagtctttctctccttcatagcttttcttttcctggacttgctccttttgagttgcttttgcgtttctcatgcctaggcaagtgtaatagaaattatgtagctccttatgttggcaaaggagctctatatagtttcactttgtataaaagttaggaccagctgttgttacatgtaatattttagttcagaacttgacctgaaggaagggaagaaaagtatgtgatttttaccttttttaacaaatgtgaaaaagtcagttttagaaatttcgtggtagtaagttcggcatttgttacatgtatagagagaagactaataatctctatttataactaaatcattgagatagaaaaagattcccattgactgtagacttcttcccattttgtcttcccttctgcctgtttccccttcaggcttggctctaggaaccaaagtgatttgttgttgttccaacctgggctttgtgactttggttagtgccactaccttcttccctcctttcccccttcaatttggaaataaatttctgtatatgttgcaattttaggtttaggtttgttctttttctttttcattaatcctctctcacctcacagataccccctcccatggcaaataatataataaccagtgaattttcaggaatttaaaaattagcttttttccacttaaaggagaaaaatatttgggactagcagcagaggcagtaagagatgtgaaccttggtgagctctgatacagtgagaagagattatactcatgaaagagaatgttagtgttacagagaagcagccgatagcaaatcgactgtagagacttggcggcggtggcattgccccaggtcgtcagcagtgtggtattatctatgagaacttgagcgacagagtatttcttgatgaatttatagatcatttgagatgttgagttactttagtttagttttgttttgttttttcaaataagtagagactattgtaaaaaacgagaaaggaaaatgaaatgtgcgtgttgatagcaataatttgtttcttttaaagattctaaaaggtctgagacctgtagcattaattatttgagtgccctcccttctcccctcccctcccttttctcttctcttttttcctctcctcttcttctcctttattcattgttttgcttttggagtgggtgttgttcaagtatctgtggtttggttctggcattttgttcccaccatccccttcccccattaacttcccccctgcttgccatcctgcagtagtataaatcatgaataaaaaataattttgctgttgtagtatacattggagaaactggcaggttttatttccattattttatttccactatatctatgataagatgcaattataaggagagaagtgactgttttttattgataaggcaagattttcagaaaaatgagtaaaataattaatgaaacatatttagagcacttaatggtctctgttttcaatataattcttgatttcatttttctctggaatatattggccttctacagctattactgaattatagaaactggtttatttctggcagaaagctgcagtgccacctgagttccaaattttaccattctttgtaaacagttggatggattatgataaagaagatgctaccaatgaaatagaaaaccaacgagatgagaagactgtgatcctcatgtactcagaggcacttccctcctaagtcaaagaccatcctcactgactatgtgccaacgcctcgtttcaggcttgtgactcaacaaagggcttttccattgatagaagcagtttgggatttgtagttgcgacttcttcgatagttacctgcacgtccattgctggcaactgacttgtcattaaaacctggctctttggttaagggagctacgctgtggtttattcttaagttacgtggataaactaacctctaacagaaatatactttggttaattttgaaatgtgtcatttttaaacaatcttaaaagtaatacagaattgtgatttattaattttaaaacattcagaacttgttgaaagaaaaattatatctgaatcaagattcatgttttttatttttattttttttgatacagagtctcactctgtcactcaggctggagtgcagtgacatgatctcagctcactgcaacctccgcttcctgggttcaagcaattctcatgcctcagcctcctgagtagctgagaccacaggcacccgccaccacacccagctatttttttgtatttttagtagagacagagtctcaccacattgcccaggctggtctccaactcctgagctcaggcagtctgcccaccttggcctcccaaagtgctgcagttacaggcgtgagccactgcacctggcctcatgttttttaaataattgccttttatatttaccctttttgtcatcactttagaatgaaaattcccatttaaatctgaaagttaccttaatagtcctcttgtgttattaggacagtattattatagtacttatttattttattttagatttaaagttatcttctctttttcttttttcttctgctgcttttagggacaattaaaactgggaaactatgaaacatggaacattttatcctacctgaaagtaaacgagtaattgtgaagcataagacactgaggctaatacaactctgtcttcatgtgttgactgcctggcacatagtattcattctcttccctttaacatagaagtgtccagctgcgtacagtctagtaaccagcaactgtaaacgaacctgtgcctctaacaagcgattctaaaccacctatgagtatttcttttagggctcacttaaatacatgtttgtatatactgtattctagccagaataattttagatctgatcaggtagtagctaaaattagaaaaaaacaaaatagatgcttaaagaatttgcatccatttttgagtctaaatcttttaaaatatactgagatccacatctagtgaaatgtcagtgtcaaaatattatagattatagctaaaatccagattaatactcatttggggttttttatagtggaacttcatagtaatacaaaaagcagattgtcttcctgtctccgctgctcccacagtaggtattgaaactggtaaaatcagttttttgatagtgtgtgtatataagaaaaaatagatacacacattcttttttctcagtcaacacattgattgaacactctggcaaagatgctgtggtggatgaggttggagttcgaaagaagaagcaagcgctggcctggccttgaaagaaccgaagtctttcccattcacttctctagaaagctgccaagacagaggcagaaagaaatggatgatagttctgtcaagcacacttctgttctcttagaacttagaagtgtttctaagagaacagaagtaataagagaaacagttacgtgtggaattcaacatctttggttggaacgcattggctttttttttcttgttttgatagaaatggaattaagcaaaagtagtttttgtcttttctgttgtcttcaaattttatgccttttatttttaatttaatcccgttcaattatttaattgttatacattgacattaactgctgtattttgactttgttcaataattttgttctttcagggctagaaataaactttttaaaaaaagtgtgcatttttccctttcctaaacttttattctttcttttgatcagcgtaaaagaatattttaatgtcttttgatagcataaaagaatatttaaatgtcttaataggttttcaaagaacatttagtatttttagtgataaatgttttaaaccttttaa

SEQ ID NO: 479 - protein, 672 aa, Homo sapiens
MADVFPGNDSTASQDVANRFARKGALRQKNVHEVKDHKFIARFFKQPTFCSHCTDFIWGFGKQGFQCQVCCFVVHKRCHEFVTFSCPGADKGPDTDDPRSKHKFKIHTYGSPTFCDHCGSLLYGLIHQGMKCDTCDMNVHKQCVINVPSLCGMDHTEKRGRIYLKAEVADEKLHVTVRDAKNLIPMDPNGLSDPYVKLKLIPDPKNESKQKTKTIRSTLNPQWNESFTFKLKPSDKDRRLSVEIWDWDRTTRNDFMGSLSFGVSELMKMPASGWYKLLNQEEGEYYNVPIPEGDEEGNMELRQKFEKAKLGPAGNKVISPSEDRKQPSNNLDRVKLTDFNFLMVLGKGSFGKVMLADRKGTEELYAIKILKKDVVIQDDDVECTMVEKRVLALLDKPPFLTQLHSCFQTVDRLYFVMEYVNGGDLMYHIQQVGKFKEPQAVFYAAEISIGLFFLHKRGIIYRDLKLDNVMLDSEGHIKIADFGMCKEHMMDGVTTRTFCGTPDYIAPEIIAYQPYGKSVDWWAYGVLLYEMLAGQPPFDGEDEDELFQSIMEHNVSYPKSLSKEAVSVCKGLMTKHPAKRLGCGPEGERDVREHAFFRRIDWEKLENREIQPPFKPKVCGKGAENFDKFFTRGQPVLTPPDQLVIANIDQSDFEGFSYVNPQFVHPILQSAV

SEQ ID NO: 480 - DNA, 8964 bp, Homo sapiens
  source 1..8964: mol_type = other DNA
gtcagtgagcctggggccagcgggcgagccagcggctccggctcccgctcccgctccgcgcagcaccagcccgactctccccggcccccgccgcgccccctcgccgcgacctcggccaccggcccgcgccccgcgcccggggtcgccccgagcccgcacctctcccccgccgcccccgcccacccggccctccgcggccgcagctccccggcggaggcaagaggtggttgggggggaccatggctgacgttttcccgggcaacgactccacggcgtctcaggacgtggccaaccgcttcgcccgcaaaggggcgctgaggcagaagaacgtgcacgaggtgaaggaccacaaattcatcgcgcgcttcttcaagcagcccaccttctgcagccactgcaccgacttcatctgggggtttgggaaacaaggcttccagtgccaagtttgctgttttgtggtccacaagaggtgccatgaatttgttactttttcttgtccgggtgcggataagggacccgacactgatgaccccaggagcaagcacaagttcaaaatccacacttacggaagccccaccttctgcgatcactgtgggtcactgctctatggacttatccatcaagggatgaaatgtgacacctgcgatatgaacgttcacaagcaatgcgtcatcaatgtccccagcctctgcggaatggatcacactgagaagagggggcggatttacctaaaggctgaggttgctgatgaaaagctccatgtcacagtacgagatgcaaaaaatctaatccctatggatccaaacgggctttcagatccttatgtgaagctgaaacttattcctgatcccaagaatgaaagcaagcaaaaaaccaaaaccatccgctccacactaaatccgcagtggaatgagtcctttacattcaaattgaaaccttcagacaaagaccgacgactgtctgtagaaatctgggactgggatcgaacaacaaggaatgacttcatgggatccctttcctttggagtttcggagctgatgaagatgccggccagtggatggtacaagttgcttaaccaagaagaaggtgagtactacaacgtacccattccggaaggggacgaggaaggaaacatggaactcaggcagaaattcgagaaagccaaacttggccctgctggcaacaaagtcatcagtccctctgaagacaggaaacaaccttccaacaaccttgaccgagtgaaactcacggacttcaatttcctcatggtgttgggaaaggggagttttggaaaggtgatgcttgccgacaggaagggcacagaagaactgtatgcaatcaaaatcctgaagaaggatgtggtgattcaggatgatgacgtggagtgcaccatggtagaaaagcgagtcttggccctgcttgacaaacccccgttcttgacgcagctgcactcctgcttccagacagtggatcggctgtacttcgtcatggaatatgtcaacggtggggacctcatgtaccacattcagcaagtaggaaaatttaaggaaccacaagcagtattctatgcggcagagatttccatcggattgttctttcttcataaaagaggaatcatttatagggatctgaagttagataacgtcatgttggattcagaaggacatatcaaaattgctgactttgggatgtgcaaggaacacatgatggatggagtcacgaccaggaccttctgtgggactccagattatatcgccccagagataatcgcttatcagccgtatggaaaatctgtggactggtgggcctatggcgtcctgttgtatgaaatgcttgccgggcagcctccatttgatggtgaagatgaagacgagctatttcagtctatcatggagcacaacgtttcctatccaaaatccttgtccaaggaggctgtttctgtctgcaaaggactgatgaccaaacacccagccaagcggctgggctgtgggcctgagggggagagggacgtgagagagcatgccttcttccggaggatcgactgggaaaaactggagaacagggagatccagccaccattcaagcccaaagtgtgtggcaaaggagcagagaactttgacaagttcttcacacgaggacagcccgtcttaacaccacctgatcagctggttattgctaacatagaccagtctgattttgaagggttctcgtatgtcaacccccagtttgtgcaccccatcttacagagtgcagtatgaaactcaccagcgagaacaaacacctccccagcccccagccctccccgcagtgggaagtgaatccttaaccctaaaattttaaggccacggccttgtgtctgattccatatggaggcctgaaaattgtagggttattagtccaaatgtgatcaactgttcagggtctctctcttacaaccaagaacattatcttagtggaagatggtacgtcatgctcagtgtccagtttaattctgtagaagttacgtctggctctaggttaacccttcctagaaagcaagcagactgttgccccattttgggtacaatttgatatactttccataccctccatctgtggatttttcagcattggaatcccccaaccagagatgttaaagtgagcctgtcccaggaaacatctccacccaagacgtctttggaatccaagaacaggaagccaagagagtgagcagggagggattgggggtgggggaggcctcaaaataccgactgcgtccattctctgcctccatggaaacagcccctagaatctgaaaggccgggataaacctaatcactgttcccaaacattgacaaatcctaacccaaccatggtccagcagttaccagtttaaacaaaaaaacctcagatgagtgttgggtgaatctgtcatctggtaccctccttggttgataactgtcttgatacttttcattctttgtaagaggccaaatcgtctaaggacgttgctgaacaagcgtgtgaaatcatttcagatcaaggataagccagtgtgtacatatgttcattttaatctctgggagattatttttccatccagggtgccatcagtaatcatgccactactcaccagtgttgttcaccaacacccacccccacacacaccaacattttgctgcctaccttgttatccttctcaagaagctgaagtgtacgccctctccccttttgtgcttatttatttaataggctgcagtgtcgcttatgaaagtacgatgtacagtaacttaatggaagtgctgactctagcatcagcctctaccgattgattttcctcccttctctagccctggatgtccacttagggataaaaagaatatggttttggttcccatttctagttcacgttgaatgacaggcctggagctgtagaatcaggaaacccggatgcctaacagctcaaagatgttttgttaatagaaggattttaatacgttttgcaaatgcatcatgcaatgaattttgcatgtttataataaaccttaataacaagtgaatctatattattgatataatcgtatcaagtataaagagagtattataataattttataagacacaattgtgctctatttgtgcaggttcttgtttctaatcctcttttctaattaagttttagctgaatcccttgcttctgtgctttccctccctgcacatgggcactgtatcagatagattactttttaaatgtagataaaatttcaaaaatgaatggctagtttacgtgatagattaggctcttactacatatgtgtgtgtatatatatgtatttgattctacctgcaaacaaatttttattggtgaggactatttttgagctgacactccctcttagtttcttcatgtcacctttcgtcctggttcctccgccactcttcctcttggggacaacaggaagtgtctgattccagtctgcctagtacgttggtacacacgtggcattgccgcagcacctgggctgacctttgtgtgtgcgtgtgtgtgtgtttccttcttcccttcagcctgtgactgttgctgactccaggggtgggagggatggggagactcccctcttgctgtgtgtactggacacgcaggaagcatgctgtcttgctgcctctgcaacgacctgtcgtttgctccagcatgcacaaacttcgtgagaccaacacagccgtgccctgcaggcaccagcacgtgcttttcagaggctgcggactttcttccagccattgtggcattggcctttccagtcttgggaggagcgcgctgctttggtgagacacccccatgcaaggtcctcagagtagccgggttctaccacaaacagaaacagaatgaaagtagctgtcagtccttgtagagagccgctctgtttcctcccagaagcatctcccagctaagctcgcattatttttctcctctggctgtttgcctgaagttcacagaacacacaaccatgaaaggctttttgaggtgagaggcccaggtggtcctggcaaccctgagtagaaggagagacggggtagggaacgggcccggccagaaaagaaccatttcttctgccatcttttatgcaccatagacatcgagactccagggggtcctggctcccctgtccctgcagccctgcaggtcagtgcatgatctgggttcgtgtcctgaccaggtgctcctcctttgatccgaggggaaagggactggtttatagaaagagcctaggagacaaaagggccagtccccctgcccagaatggagcagcagcaggacagacccccacgaggccccccagagaggaggaagatcccacggaggaacacatgaggttagggacccttgttcagcaccccaaacagcctgcctgtttaaagcaggcagcaggcttaggccttccctgcaaccccaacacccacaagtttgtttctctaggaaacacattcactgtctcagctggctgttactctctcagaccatatggcaaagttttccaagaaaatgccccgacaggggtgcccagcacactgcctgagggacaacagacatcagaacaaacccccagagagaaacagtcaaaatcagggcccggtgcagtgttgtcatgtggaacctgctttatccattgctgagtgttgaatgtgggtaatggttagggctttccagatctcagcagccaaagacagttattgttggaagactgtcatgtagataaccatgagcaatggctcgcctcagaatcagttcataaaattctatggtactggccccttcgtgggtattgtgtgaaatgagatggtggcgaggggtgcgctgtggaactgccgcagccacgcaggaggtccctgggggatgctttgggaagtccttgcccctgagcactgcctgattgccagggcctgtggaggtctaggccgcctggcagaatctagcaccgtccgaatccccgcaggacccatggagctatgaccacaccaggccattcaaatggctctgcattatcttcccttggaaggtggccactcctcggtggcagggcctttccctgaggctgcaggccgtgggctggcagcccgtctcttggcatttcaattgaaggtcaccaggtgctgggtttgaaaggaagtcactggagtgctgccaggggccgccctccaaggttaatgagaggcccacatccaggcaagaactaattcaaaaggcagatcagaaaccacaggagtcaaaattattgctccggcagtgcttcccttcctttcatccactggcctcgtgtggtccatgcagggccactgtctgccctttctgatgccacgtattaggctttcttactcagaattttgatagaaaaccatggggccaagagctctggaagcctggccggaaagaccaaggttcatgcagcccaacaaatgattgttgagcacctctcggagccaaagtccttaggcgagtgtggtgacttcctggaaggaggatgcagacttccagagagcccccccaacggacgtgctgagaagggagagggaggcgggggctgtagtcaggaaggagccagagaagaacagggtttgggtgcatccagaaatatgcctgcagtaggagggagaggaaggggtgccaccgtcaacggcttcccatcggaggtggttggtgcagatggaagtttctgtctgctggccctcaagagagtgttttgccagggacacagtctgttcctcctcagaaaacaccccccaaatgctaacaacatccccaccagctgctagaagcccctttcccctccccaccttgaagtagctcatagttctctgggcagagccagaccatccagtgtaccccagaggccagtaggttcctgcccattttcctctctggcttcctgccaagaattatggcagctgaggatgaatggagaagtaaaaacaactaacaccgcacaactaacaactaacaccgcagttcccacctgggttccacttagcaggagacatttcggagggttttttttgtttttgttcctgttttttttttttttgctggaatttgttttctcagtactgaaaagagaaaaagtgacaatcttgtatttttaaaagcctcggaaaggtgataccatctgacagtcattttctcacgttggtcttctaaagtcacctatttcttgtgtgtgcacatcacaccatttcctgtttctttataacccgacaagggtaggagtgcctgtttcccctgctgggcacaccagacaatcgtaatcacaaaacagacactgagccaggggcccaaagggtgtgatcatgagagttaccgggacagcagtaggcatgacagtcaccaggaaggacaagggtgctctgttgttagtggccacacaccaatttgacaaggagtgttgcgaaatttttatttatttatttatttattttgagatggagtttcactcttgttgcccaggctggagtgcggtggtacaatctcggctcactgcaacctccacctcccaggttcaagcgattctcctgcctcagcctcccaagtacctgggactacaggtgcgtgccaccacacccagctaaattttgtgtttttagtagagatggggtttcaccatgttggccaggatggtcttgaacccctgacctcatgatctgcctgcctcggcctcccaaagtgctgggattacaggcatgagccaccacgcccagccaaaatatttttttaaagtcattttccttaagctgcttgggctacatgtgaaatacactggacggtcaacattcctgtctcctcccatttgggctgatgcagcagatccagggaatgttacctgtttctgctgctagaagatccaggaaattgggaaggttacctgacgcacacatggatgaaggccatcatctagaaatggggtcaaccacaattgtgttaattccgtagtgtcagggattcttcgggaaggtcaacagtatgaaggattctgacccctgtgcctcccatttatgtgatcaggtgacagttaataaccgtggaggtcacactcagccatccaacagccttacagtgaccctacacaaaagcccccaaattccaaagactttttcttaacctaaaggaagaaattatttgttaattccagtagagcaactgaatatactgggctatttgtacttttttatagagaactttaataataattctttaaaaatgagtttttagaacaaagcaactgacgatttcctaagattccaatgccctggagcttgtaggaggacttagcctgggtcagctggagcacccccgacctgatctcccactgccagattttcccatgctcctagggtatggagtccacgtgggaatgactgcaagttcaggtggaacttggccgactgatgctctgcgagtttttaatagacactggggacaactgcttaaggtttagaaacttccaaaccacaggaaagacatttttagtgtcccccatccagaggcagccctggaataggattcccaggggtttctgggacccctttccttgctccgtgaggctctgtggccatcttttggcaggaggaggatgcttccttggctctgtgcccagacccgcctggtccccaggtctctcaccttgggtgaagattcagagatgccctgtaaggattttgcccactgggcaactcagaaatacttcgatctcccaagatataagaggcagcagcaaacgtgcctattgacgtctgtttcatagttaccacttacgcgagtagacagaactcggcttttcagaaaataggtgtcaagtccactttataagaacctttttttctaaaataagataaaaggtggctttgcattttctgattaaacgactgtgtctttgtcacctctgcttaactttaggagtatccattcctgtgattgtagacttttgttgatattcttcctggaagaatatcattcttttcttgaagggttggtttactagaatattcaaaatcaatcatgaaggcagttactattttgagtctaaaggttttctaaaaattaacctcacatcccttctgttagggtctttcagaatatcttttataaacagaagcatttgaagtcattgcttttgctacatgatttgtgtgtgtgaaggacataccacgtttaaatcattaattgaaaaacatcatataagccccaactttgtttggaggaagagacggaggttgaggtttttccttctgtataagcacctactgacaaaatgtagaggccattcaaccgtcaaacaccatttggttatatcgcagaggagacggatgtgtaaattactgcattgctttttttttcagtttgtataacctctaatctccgtttgcatgatacgctttgttagaaacattaattgtagtttggaagcaagtgtgtatgaataaagataatgatcattc

SEQ ID NO: 481 - protein, 215 aa, Homo sapiens
MSETVPPAPAASAAPEKPLAGKKAKKPAKAAAASKKKPAGPSVSELIVQAASSSKERGGVSLAALKKALAAAGYDVEKNNSRIKLGIKSLVSKGTLVQTKGTGASGSFKLNKKASSVETKPGASKVATKTKATGASKKLKKATGASKKSVKTPKKAKKPAATRKSSKNPKKPKTVKPKKVAKSPAKAKAVKPKAAKARVTKPKTAKPKKAAPKKK

SEQ ID NO: 482 - DNA, 781 bp, Homo sapiens
  source 1..781: mol_type = other DNA
taggctgcgttggggcctttttttcgcatcctgcttcgtcaggtttataccactttatttggtgtgctgtgttagtcaccatgtctgaaacagtgcctcccgcccccgccgcttctgctgctcctgagaaacctttagctggcaagaaggcaaagaaacctgctaaggctgcagcagcctccaagaaaaaacccgctggcccttccgtgtcagagctgatcgtgcaggctgcttcctcctctaaggagcgtggtggtgtgtcgttggcagctcttaaaaaggcgctggcggccgcaggctacgacgtggagaagaacaacagccgcattaagctgggcattaagagcctggtaagcaagggaacgttggtgcagacaaagggtaccggagcctcgggttccttcaagctcaacaagaaggcgtcctccgtggaaaccaagcccggcgcctcaaaggtggctacaaaaactaaggcaacgggtgcatctaaaaagctcaaaaaggccacgggggctagcaaaaagagcgtcaagactccgaaaaaggctaaaaagcctgcggcaacaaggaaatcctccaagaatccaaaaaaacccaaaactgtaaagcccaagaaagtagctaaaagccctgctaaagctaaggctgtaaaacccaaggcggccaaggctagggtgacgaagccaaagactgccaaacccaagaaagcggcacccaagaaaaagtaaattcagttagaagtttcttctagtaacccaacggctcttttaagagccaccta

SEQ ID NO: 483 - protein, 631 aa, Homo sapiens
MVSKLSQLQTELLAALLESGLSKEALIQALGEPGPYLLAGEGPLDKGESCGGGRGELAELPNGLGETRGSEDETDDDGEDFTPPILKELENLSPEEAAHQKAVVETLLQEDPWRVAKMVKSYLQQHNIPQREVVDTTGLNQSHLSQHLNKGTPMKTQKRAALYTWYVRKQREVAQQFTHAGQGGLIEEPTGDELPTKKGRRNRFKWGPASQQILFQAYERQKNPSKEERETLVEECNRAECIQRGVSPSQAQGLGSNLVTEVRVYNWFANRRKEEAFRHKLAMDTYSGPPPGPGPGPALPAHSSPGLPPPALSPSKVHGVRYGQPATSETAEVPSSSGGPLVTVSTPLHQVSPTGLEPSHSLLSTEAKLVSAAGGPLPPVSTLTALHSLEQTSPGLNQQPQNLIMASLPGVMTIGPGEPASLGPTFTNTGASTLVIGLASTQAQSVPVINSMGSSLTTLQPVQFSQPLHPSYQQPLMPPVQSHVTQSPFMATMAQLQSPHALYSHKPEVAQYTHTGLLPQTMLITDTTNLSALASLTPTKQVFTSDTEASSESGLHTPASQATTLHVPSQDPAGIQHLQPAHRLSASPTVSSSSLVLYQSSDSSNGQSHLLPSNHSVIETFISTQMASSSQ

SEQ ID NO: 484 - DNA, 3417 bp, Homo sapiens
  source 1..3417: mol_type = other DNA
ggggccctgattcacgggccgctggggccagggttgggggttgggggtgcccacagggcttggctagtggggttttgggggggcagtgggtgcaaggagtttggtttgtgtctgccggccggcaggcaaacgcaacccacgcggtgggggaggcggctagcgtggtggacccgggccgcgtggccctgtggcagccgagccatggtttctaaactgagccagctgcagacggagctcctggcggccctgctcgagtcagggctgagcaaagaggcactgatccaggcactgggtgagccggggccctacctcctggctggagaaggccccctggacaagggggagtcctgcggcggcggtcgaggggagctggctgagctgcccaatgggctgggggagactcggggctccgaggacgagacggacgacgatggggaagacttcacgccacccatcctcaaagagctggagaacctcagccctgaggaggcggcccaccagaaagccgtggtggagacccttctgcaggaggacccgtggcgtgtggcgaagatggtcaagtcctacctgcagcagcacaacatcccacagcgggaggtggtcgataccactggcctcaaccagtcccacctgtcccaacacctcaacaagggcactcccatgaagacgcagaagcgggccgccctgtacacctggtacgtccgcaagcagcgagaggtggcgcagcagttcacccatgcagggcagggagggctgattgaagagcccacaggtgatgagctaccaaccaagaaggggcggaggaaccgtttcaagtggggcccagcatcccagcagatcctgttccaggcctatgagaggcagaagaaccctagcaaggaggagcgagagacgctagtggaggagtgcaatagggcggaatgcatccagagaggggtgtccccatcacaggcacaggggctgggctccaacctcgtcacggaggtgcgtgtctacaactggtttgccaaccggcgcaaagaagaagccttccggcacaagctggccatggacacgtacagcgggccccccccagggccaggcccgggacctgcgctgcccgctcacagctcccctggcctgcctccacctgccctctcccccagtaaggtccacggtgtgcgctatggacagcctgcgaccagtgagactgcagaagtaccctcaagcagcggcggtcccttagtgacagtgtctacacccctccaccaagtgtcccccacgggcctggagcccagccacagcctgctgagtacagaagccaagctggtctcagcagctgggggccccctcccccctgtcagcaccctgacagcactgcacagcttggagcagacatccccaggcctcaaccagcagccccagaacctcatcatggcctcacttcctggggtcatgaccatcgggcctggtgagcctgcctccctgggtcctacgttcaccaacacaggtgcctccaccctggtcatcggcctggcctccacgcaggcacagagtgtgccggtcatcaacagcatgggcagcagcctgaccaccctgcagcccgtccagttctcccagccgctgcacccctcctaccagcagccgctcatgccacctgtgcagagccatgtgacccagagccccttcatggccaccatggctcagctgcagagcccccacgccctctacagccacaagcccgaggtggcccagtacacccacacgggcctgctcccgcagactatgctcatcaccgacaccaccaacctgagcgccctggccagcctcacgcccaccaagcaggtcttcacctcagacactgaggcctccagtgagtccgggcttcacacgccggcatctcaggccaccaccctccacgtccccagccaggaccctgccggcatccagcacctgcagccggcccaccggctcagcgccagccccacagtgtcctccagcagcctggtgctgtaccagagctcagactccagcaatggccagagccacctgctgccatccaaccacagcgtcatcgagaccttcatctccacccagatggcctcttcctcccagtaaccacggcacctgggccctggggcctgtactgcctgcttggggggtgatgagggcagcagccagccctgcctggaggacctgagcctgccgagcaaccgtggcccttcctggacagctgtgcctcgctccccactctgctctgatgcatcagaaagggagggctctgaggcgccccaacccgtggaggctgctcggggtgcacaggagggggtcgtggagagctaggagcaaagcctgttcatggcagatgtaggagggactgtcgctgcttcgtgggatacagtcttcttacttggaactgaagggggcggcctatgacttgggcacccccagcctgggcctatggagagccctgggaccgctacaccactctggcagccacacttctcaggacacaggcctgtgtagctgtgacctgctgagctctgagaggccctggatcagcgtggccttgttctgtcaccaatgtacccaccgggccactccttcctgccccaactccttccagctagtgacccacatgccatttgtactgaccccatcacctactcacacaggcatttcctgggtggctactctgtgccagagcctggggctctaacgcctgagcccagggaggccgaagctaacagggaaggcaggcagggctctcctggcttcccatccccagcgattccctctcccaggccccatgacctccagctttcctgtatttgttcccaagagcatcatgcctctgaggccagcctggcctcctgcctctactgggaaggctacttcggggctgggaagtcgtccttactcctgtgggagcctcgcaacccgtgccaagtccaggtcctggtggggcagctcctctgtctcgagcgccctgcagaccctgcccttgtttggggcaggagtagctgagctcacaaggcagcaaggcccgagcagctgagcagggccggggaactggccaagctgaggtgcccaggagaagaaagaggtgaccccagggcacaggagctacctgtgtggacaggactaacactcagaagcctgggggcctggctggctgagggcagttcgcagccaccctgaggagtctgaggtcctgagcactgccaggagggacaaaggagcctgtgaacccaggacaagcatggtcccacatccctgggcctgctgctgagaacctggccttcagtgtaccgcgtctaccctgggattcaggaaaaggcctggggtgacccggcaccccctgcagcttgtagccagccggggcgagtggcacgtttatttaacttttagtaaagtcaaggagaaatgcggtggaaa

SEQ ID NO: 485 - protein, 4563 aa, Homo sapiens
MDPPRPALLALLALPALLLLLLAGARAEEEMLENVSLVCPKDATRFKHLRKYTYNYEAESSSGVPGTADSRSATRINCKVELEVPQLCSFILKTSQCTLKEVYGFNPEGKALLKKTKNSEEFAAAMSRYELKLAIPEGKQVFLYPEKDEPTYILNIKRGIISALLVPPETEEAKQVLFLDTVYGNCSTHFTVKTRKGNVATEISTERDLGQCDRFKPIRTGISPLALIKGMTRPLSTLISSSQSCQYTLDAKRKHVAEAICKEQHLFLPFSYKNKYGMVAQVTQTLKLEDTPKINSRFFGEGTKKMGLAFESTKSTSPPKQAEAVLKTLQELKKLTISEQNIQRANLFNKLVTELRGLSDEAVTSLLPQLIEVSSPITLQALVQCGQPQCSTHILQWLKRVHANPLLIDVVTYLVALIPEPSAQQLREIFNMARDQRSRATLYALSHAVNNYHKTNPTGTQELLDIANYLMEQIQDDCTGDEDYTYLILRVIGNMGQTMEQLTPELKSSILKCVQSTKPSLMIQKAAIQALRKMEPKDKDQEVLLQTFLDDASPGDKRLAAYLMLMRSPSQADINKIVQILPWEQNEQVKNFVASHIANILNSEELDIQDLKKLVKEALKESQLPTVMDFRKFSRNYQLYKSVSLPSLDPASAKIEGNLIFDPNNYLPKESMLKTTLTAFGFASADLIEIGLEGKGFEPTLEALFGKQGFFPDSVNKALYWVNGQVPDGVSKVLVDHFGYTKDDKHEQDMVNGIMLSVEKLIKDLKSKEVPEARAYLRILGEELGFASLHDLQLLGKLLLMGARTLQGIPQMIGEVIRKGSKNDFFLHYIFMENAFELPTGAGLQLQISSSGVIAPGAKAGVKLEVANMQAELVAKPSVSVEFVTNMGIIIPDFARSGVQMNTNFFHESGLEAHVALKAGKLKFIIPSPKRPVKLLSGGNTLHLVSTTKTEVIPPLIENRQSWSVCKQVFPGLNYCTSGAYSNASSTDSASYYPLTGDTRLELELRPTGEIEQYSVSATYELQREDRALVDTLKFVTQAEGAKQTEATMTFKYNRQSMTLSSEVQIPDFDVDLGTILRVNDESTEGKTSYRLTLDIQNKKITEVALMGHLSCDTKEERKIKGVISIPRLQAEARSEILAHWSPAKLLLQMDSSATAYGSTVSKRVAWHYDEEKIEFEWNTGTNVDTKKMTSNFPVDLSDYPKSLHMYANRLLDHRVPQTDMTFRHVGSKLIVAMSSWLQKASGSLPYTQTLQDHLNSLKEFNLQNMGLPDFHIPENLFLKSDGRVKYTLNKNSLKIEIPLPFGGKSSRDLKMLETVRTPALHFKSVGFHLPSREFQVPTFTIPKLYQLQVPLLGVLDLSTNVYSNLYNWSASYSGGNTSTDHFSLRARYHMKADSVVDLLSYNVQGSGETTYDHKNTFTLSCDGSLRHKFLDSNIKFSHVEKLGNNPVSKGLLIFDASSSWGPQMSASVHLDSKKKQHLFVKEVKIDGQFRVSSFYAKGTYGLSCQRDPNTGRLNGESNLRFNSSYLQGTNQITGRYEDGTLSLTSTSDLQSGIIKNTASLKYENYELTLKSDTNGKYKNFATSNKMDMTFSKQNALLRSEYQADYESLRFFSLLSGSLNSHGLELNADILGTDKINSGAHKATLRIGQDGISTSATTNLKCSLLVLENELNAELGLSGASMKLTTNGRFREHNAKFSLDGKAALTELSLGSAYQAMILGVDSKNIFNFKVSQEGLKLSNDMMGSYAEMKFDHTNSLNIAGLSLDFSSKLDNIYSSDKFYKQTVNLQLQPYSLVTTLNSDLKYNALDLTNNGKLRLEPLKLHVAGNLKGAYQNNEIKHIYAISSAALSASYKADTVAKVQGVEFSHRLNTDIAGLASAIDMSTNYNSDSLHFSNVFRSVMAPFTMTIDAHTNGNGKLALWGEHTGQLYSKFLLKAEPLAFTFSHDYKGSTSHHLVSRKSISAALEHKVSALLTPAEQTGTWKLKTQFNNNEYSQDLDAYNTKDKIGVELTGRTLADLTLLDSPIKVPLLLSEPINIIDALEMRDAVEKPQEFTIVAFVKYDKNQDVHSINLPFFETLQEYFERNRQTIIVVLENVQRNLKHINIDQFVRKYRAALGKLPQQANDYLNSFNWERQVSHAKEKLTALTKKYRITENDIQIALDDAKINFNEKLSQLQTYMIQFDQYIKDSYDLHDLKIAIANIIDEIIEKLKSLDEHYHIRVNLVKTIHDLHLFIENIDFNKSGSSTASWIQNVDTKYQIRIQIQEKLQQLKRHIQNIDIQHLAGKLKQHIEAIDVRVLLDQLGTTISFERINDILEHVKHFVINLIGDFEVAEKINAFRAKVHELIERYEVDQQIQVLMDKLVELAHQYKLKETIQKLSNVLQQVKIKDYFEKLVGFIDDAVKKLNELSFKTFIEDVNKFLDMLIKKLKSFDYHQFVDETNDKIREVTQRLNGEIQALELPQKAEALKLFLEETKATVAVYLESLQDTKITLIINWLQEALSSASLAHMKAKFRETLEDTRDRMYQMDIQQELQRYLSLVGQVYSTLVTYISDWWTLAAKNLTDFAEQYSIQDWAKRMKALVEQGFTVPEIKTILGTMPAFEVSLQALQKATFQTPDFIVPLTDLRIPSVQINFKDLKNIKIPSRFSTPEFTILNTFHIPSFTIDFVEMKVKIIRTIDQMLNSELQWPVPDIYLRDLKVEDIPLARITLPDFRLPEIAIPEFIIPTLNLNDFQVPDLHIPEFQLPHISHTIEVPTFGKLYSILKIQSPLFTLDANADIGNGTTSANEAGIAASITAKGESKLEVLNFDFQANAQLSNPKINPLALKESVKFSSKYLRTEHGSEMLFFGNAIEGKSNTVASLHTEKNTLELSNGVIVKINNQLTLDSNTKYFHKLNIPKLDFSSQADLRNEIKTLLKAGHIAWTSSGKGSWKWACPRFSDEGTHESQISFTIEGPLTSFGLSNKINSKHLRVNQNLVYESGSLNFSKLEIQSQVDSQHVGHSVLTAKGMALFGEGKAEFTGRHDAHLNGKVIGTLKNSLFFSAQPFEITASTNNEGNLKVRFPLRLTGKIDFLNNYALFLSPSAQQASWQVSARFNQYKYNQNFSAGNNENIMEAHVGINGEANLDFLNIPLTIPEMRLPYTIITTPPLKDFSLWEKTGLKEFLKTTKQSFDLSVKAQYKKNKHRHSITNPLAVLCEFISQSIKSFDRHFEKNRNNALDFVTKSYNETKIKFDKYKAEKSHDELPRTFQIPGYTVPVVNVEVSPFTIEMSAFGYVFPKAVSMPSFSILGSDVRVPSYTLILPSLELPVLHVPRNLKLSLPDFKELCTISHIFIPAMGNITYDFSFKSSVITLNTNAELFNQSDIVAHLLSSSSSVIDALQYKLEGTTRLTRKRGLKLATALSLSNKFVEGSHNSTVSLTTKNMEVSVATTTKAQIPILRMNFKQELNGNTKSKPTVSSSMEFKYDFNSSMLYSTAKGAVDHKLSLESLTSYFSIESSTKGDVKGSVLSREYSGTIASEANTYLNSKSTRSSVKLQGTSKIDDIWNLEVKENFAGEATLQRIYSLWEHSTKNHLQLEGLFFTNGEHTSKATLELSPWQMSALVQVHASQPSSFHDFPDLGQEVALNANTKNQKIRWKNEVRIHSGSFQSQVELSNDQEKAHLDIAGSLEGHLRFLKNIILPVYDKSLWDFLKLDVTTSIGRRQHLRVSTAFVYTKNPNGYSFSIPVKVLADKFIIPGLKLNDLNSVLVMPTFHVPFTDLQVPSCKLDFREIQIYKKLRTSSFALNLPTLPEVKFPEVDVLTKYSQPEDSLIPFFEITVPESQLTVSQFTLPKSVSDGIAALDLNAVANKIADFELPTIIVPEQTIEIPSIKFSVPAGIVIPSFQALTARFEVDSPVYNATWSASLKNKADYVETVLDSTCSSTVQFLEYELNVLGTHKIEDGTLASKTKGTFAHRDFSAEYEEDGKYEGLQEWEGKAHLNIKSPAFTDLHLRYQKDKKGISTSAASPAVGTVGMDMDEDDDFSKWNFYYSPQSSPDKKLTIFKTELRVRESDEETQIKVNWEEEAASGLLTSLKDNVPKATGVLYDYVNKYHWEHTGLTLREVSSKLRRNLQNNAEWVYQGAIRQIDDIDVRFQKAASGTTGTYQEWKDKAQNLYQELLTQEGQASFQGLKDNVFDGLVRVTQEFHMKVKHLIDSLIDFLNFPRFQFPGKPGIYTREELCTMFIREVGTVLSQVYSKVHNGSEILFSYFQDLVITLPFELRKHKLIDVISMYRELLKDLSKEAQEVFKAIQSLKTTEVLRNLQDLLQFIFQLIEDNIKQLKEMKFTYLINYIQDEINTIFSDYIPYVFKLLKENLCLNLHKFNEFIQNELQEASQELQQIHQYIMALREEYFDPSIVGWTVKYYELEEKIVSLIKNLLVALKDFHSEYIVSASNFTSQLSSQVEQFLHRNIQEYLSILTDPDGKGKEKIAELSATAQEIIKSQAIATKKIISDYHQQFRYKLQDFSDQLSDYYEKFIAESKRLIDLSIQNYHTFLIYITELLKKLQSTTVMNPYMKLAPGELTIIL

SEQ ID NO: 486 - DNA, 14121 bp, Homo sapiens
  source 1..14121: mol_type = other DNA
attcccaccgggacctgcggggctgagtgcccttctcggttgctgccgctgaggagcccgcccagccagccagggccgcgaggccgaggccaggccgcagcccaggagccgccccaccgcagctggcgatggacccgccgaggcccgcgctgctggcgctgctggcgctgcctgcgctgctgctgctgctgctggcgggcgccagggccgaagaggaaatgctggaaaatgtcagcctggtctgtccaaaagatgcgacccgattcaagcacctccggaagtacacatacaactatgaggctgagagttccagtggagtccctgggactgctgattcaagaagtgccaccaggatcaactgcaaggttgagctggaggttccccagctctgcagcttcatcctgaagaccagccagtgcaccctgaaagaggtgtatggcttcaaccctgagggcaaagccttgctgaagaaaaccaagaactctgaggagtttgctgcagccatgtccaggtatgagctcaagctggccattccagaagggaagcaggttttcctttacccggagaaagatgaacctacttacatcctgaacatcaagaggggcatcatttctgccctcctggttcccccagagacagaagaagccaagcaagtgttgtttctggataccgtgtatggaaactgctccactcactttaccgtcaagacgaggaagggcaatgtggcaacagaaatatccactgaaagagacctggggcagtgtgatcgcttcaagcccatccgcacaggcatcagcccacttgctctcatcaaaggcatgacccgccccttgtcaactctgatcagcagcagccagtcctgtcagtacacactggacgctaagaggaagcatgtggcagaagccatctgcaaggagcaacacctcttcctgcctttctcctacaagaataagtatgggatggtagcacaagtgacacagactttgaaacttgaagacacaccaaagatcaacagccgcttctttggtgaaggtactaagaagatgggcctcgcatttgagagcaccaaatccacatcacctccaaagcaggccgaagctgttttgaagactctccaggaactgaaaaaactaaccatctctgagcaaaatatccagagagctaatctcttcaataagctggttactgagctgagaggcctcagtgatgaagcagtcacatctctcttgccacagctgattgaggtgtccagccccatcactttacaagccttggttcagtgtggacagcctcagtgctccactcacatcctccagtggctgaaacgtgtgcatgccaacccccttctgatagatgtggtcacctacctggtggccctgatccccgagccctcagcacagcagctgcgagagatcttcaacatggcgagggatcagcgcagccgagccaccttgtatgcgctgagccacgcggtcaacaactatcataagacaaaccctacagggacccaggagctgctggacattgctaattacctgatggaacagattcaagatgactgcactggggatgaagattacacctatttgattctgcgggtcattggaaatatgggccaaaccatggagcagttaactccagaactcaagtcttcaatcctgaaatgtgtccaaagtacaaagccatcactgatgatccagaaagctgccatccaggctctgcggaaaatggagcctaaagacaaggaccaggaggttcttcttcagactttccttgatgatgcttctccgggagataagcgactggctgcctatcttatgttgatgaggagtccttcacaggcagatattaacaaaattgtccaaattctaccatgggaacagaatgagcaagtgaagaactttgtggcttcccatattgccaatatcttgaactcagaagaattggatatccaagatctgaaaaagttagtgaaagaagctctgaaagaatctcaacttccaactgtcatggacttcagaaaattctctcggaactatcaactctacaaatctgtttctcttccatcacttgacccagcctcagccaaaatagaagggaatcttatatttgatccaaataactaccttcctaaagaaagcatgctgaaaactaccctcactgcctttggatttgcttcagctgacctcatcgagattggcttggaaggaaaaggctttgagccaacattggaagctctttttgggaagcaaggatttttcccagacagtgtcaacaaagctttgtactgggttaatggtcaagttcctgatggtgtctctaaggtcttagtggaccactttggctataccaaagatgataaacatgagcaggatatggtaaatggaataatgctcagtgttgagaagctgattaaagatttgaaatccaaagaagtcccggaagccagagcctacctccgcatcttgggagaggagcttggttttgccagtctccatgacctccagctcctgggaaagctgcttctgatgggtgcccgcactctgcaggggatcccccagatgattggagaggtcatcaggaagggctcaaagaatgacttttttcttcactacatcttcatggagaatgcctttgaactccccactggagctggattacagttgcaaatatcttcatctggagtcattgctcccggagccaaggctggagtaaaactggaagtagccaacatgcaggctgaactggtggcaaaaccctccgtgtctgtggagtttgtgacaaatatgggcatcatcattccggacttcgctaggagtggggtccagatgaacaccaacttcttccacgagtcgggtctggaggctcatgttgccctaaaagctgggaagctgaagtttatcattccttccccaaagagaccagtcaagctgctcagtggaggcaacacattacatttggtctctaccaccaaaacggaggtgatcccacctctcattgagaacaggcagtcctggtcagtttgcaagcaagtctttcctggcctgaattactgcacctcaggcgcttactccaacgccagctccacagactccgcctcctactatccgctgaccggggacaccagattagagctggaactgaggcctacaggagagattgagcagtattctgtcagcgcaacctatgagctccagagagaggacagagccttggtggataccctgaagtttgtaactcaagcagaaggtgcgaagcagactgaggctaccatgacattcaaatataatcggcagagtatgaccttgtccagtgaagtccaaattccggattttgatgttgacctcggaacaatcctcagagttaatgatgaatctactgagggcaaaacgtcttacagactcaccctggacattcagaacaagaaaattactgaggtcgccctcatgggccacctaagttgtgacacaaaggaagaaagaaaaatcaagggtgttatttccataccccgtttgcaagcagaagccagaagtgagatcctcgcccactggtcgcctgccaaactgcttctccaaatggactcatctgctacagcttatggctccacagtttccaagagggtggcatggcattatgatgaagagaagattgaatttgaatggaacacaggcaccaatgtagataccaaaaaaatgacttccaatttccctgtggatctctccgattatcctaagagcttgcatatgtatgctaatagactcctggatcacagagtccctcaaacagacatgactttccggcacgtgggttccaaattaatagttgcaatgagctcatggcttcagaaggcatctgggagtcttccttatacccagactttgcaagaccacctcaatagcctgaaggagttcaacctccagaacatgggattgccagacttccacatcccagaaaacctcttcttaaaaagcgatggccgggtcaaatataccttgaacaagaacagtttgaaaattgagattcctttgccttttggtggcaaatcctccagagatctaaagatgttagagactgttaggacaccagccctccacttcaagtctgtgggattccatctgccatctcgagagttccaagtccctacttttaccattcccaagttgtatcaactgcaagtgcctctcctgggtgttctagacctctccacgaatgtctacagcaacttgtacaactggtccgcctcctacagtggtggcaacaccagcacagaccatttcagccttcgggctcgttaccacatgaaggctgactctgtggttgacctgctttcctacaatgtgcaaggatctggagaaacaacatatgaccacaagaatacgttcacactatcatgtgatgggtctctacgccacaaatttctagattcgaatatcaaattcagtcatgtagaaaaacttggaaacaacccagtctcaaaaggtttactaatattcgatgcatctagttcctggggaccacagatgtctgcttcagttcatttggactccaaaaagaaacagcatttgtttgtcaaagaagtcaagattgatgggcagttcagagtctcttcgttctatgctaaaggcacatatggcctgtcttgtcagagggatcctaacactggccggctcaatggagagtccaacctgaggtttaactcctcctacctccaaggcaccaaccagataacaggaagatatgaagatggaaccctctccctcacctccacctctgatctgcaaagtggcatcattaaaaatactgcttccctaaagtatgagaactacgagctgactttaaaatctgacaccaatgggaagtataagaactttgccacttctaacaagatggatatgaccttctctaagcaaaatgcactgctgcgttctgaatatcaggctgattacgagtcattgaggttcttcagcctgctttctggatcactaaattcccatggtcttgagttaaatgctgacatcttaggcactgacaaaattaatagtggtgctcacaaggcgacactaaggattggccaagatggaatatctaccagtgcaacgaccaacttgaagtgtagtctcctggtgctggagaatgagctgaatgcagagcttggcctctctggggcatctatgaaattaacaacaaatggccgcttcagggaacacaatgcaaaattcagtctggatgggaaagccgccctcacagagctatcactgggaagtgcttatcaggccatgattctgggtgtcgacagcaaaaacattttcaacttcaaggtcagtcaagaaggacttaagctctcaaatgacatgatgggctcatatgctgaaatgaaatttgaccacacaaacagtctgaacattgcaggcttatcactggacttctcttcaaaacttgacaacatttacagctctgacaagttttataagcaaactgttaatttacagctacagccctattctctggtaactactttaaacagtgacctgaaatacaatgctctggatctcaccaacaatgggaaactacggctagaacccctgaagctgcatgtggctggtaacctaaaaggagcctaccaaaataatgaaataaaacacatctatgccatctcttctgctgccttatcagcaagctataaagcagacactgttgctaaggttcagggtgtggagtttagccatcggctcaacacagacatcgctgggctggcttcagccattgacatgagcacaaactataattcagactcactgcatttcagcaatgtcttccgttctgtaatggccccgtttaccatgaccatcgatgcacatacaaatggcaatgggaaactcgctctctggggagaacatactgggcagctgtatagcaaattcctgttgaaagcagaacctctggcatttactttctctcatgattacaaaggctccacaagtcatcatctcgtgtctaggaaaagcatcagtgcagctcttgaacacaaagtcagtgccctgcttactccagctgagcagacaggcacctggaaactcaagacccaatttaacaacaatgaatacagccaggacttggatgcttacaacactaaagataaaattggcgtggagcttactggacgaactctggctgacctaactctactagactccccaattaaagtgccacttttactcagtgagcccatcaatatcattgatgctttagagatgagagatgccgttgagaagccccaagaatttacaattgttgcttttgtaaagtatgataaaaaccaagatgttcactccattaacctcccattttttgagaccttgcaagaatattttgagaggaatcgacaaaccattatagttgtactggaaaacgtacagagaaacctgaagcacatcaatattgatcaatttgtaagaaaatacagagcagccctgggaaaactcccacagcaagctaatgattatctgaattcattcaattgggagagacaagtttcacatgccaaggagaaactgactgctctcacaaaaaagtatagaattacagaaaatgatatacaaattgcattagatgatgccaaaatcaactttaatgaaaaactatctcaactgcagacatatatgatacaatttgatcagtatattaaagatagttatgatttacatgatttgaaaatagctattgctaatattattgatgaaatcattgaaaaattaaaaagtcttgatgagcactatcatatccgtgtaaatttagtaaaaacaatccatgatctacatttgtttattgaaaatattgattttaacaaaagtggaagtagtactgcatcctggattcaaaatgtggatactaagtaccaaatcagaatccagatacaagaaaaactgcagcagcttaagagacacatacagaatatagacatccagcacctagctggaaagttaaaacaacacattgaggctattgatgttagagtgcttttagatcaattgggaactacaatttcatttgaaagaataaatgacattcttgagcatgtcaaacactttgttataaatcttattggggattttgaagtagctgagaaaatcaatgccttcagagccaaagtccatgagttaatcgagaggtatgaagtagaccaacaaatccaggttttaatggataaattagtagagttggcccaccaatacaagttgaaggagactattcagaagctaagcaatgtcctacaacaagttaagataaaagattactttgagaaattggttggatttattgatgatgctgtcaagaagcttaatgaattatcttttaaaacattcattgaagatgttaacaaattccttgacatgttgataaagaaattaaagtcatttgattaccaccagtttgtagatgaaaccaatgacaaaatccgtgaggtgactcagagactcaatggtgaaattcaggctctggaactaccacaaaaagctgaagcattaaaactgtttttagaggaaaccaaggccacagttgcagtgtatctggaaagcctacaggacaccaaaataaccttaatcatcaattggttacaggaggctttaagttcagcatctttggctcacatgaaggccaaattccgagagaccctagaagatacacgagaccgaatgtatcaaatggacattcagcaggaacttcaacgatacctgtctctggtaggccaggtttatagcacacttgtcacctacatttctgattggtggactcttgctgctaagaaccttactgactttgcagagcaatattctatccaagattgggctaaacgtatgaaagcattggtagagcaagggttcactgttcctgaaatcaagaccatccttgggaccatgcctgcctttgaagtcagtcttcaggctcttcagaaagctaccttccagacacctgattttatagtccccctaacagatttgaggattccatcagttcagataaacttcaaagacttaaaaaatataaaaatcccatccaggttttccacaccagaatttaccatccttaacaccttccacattccttcctttacaattgactttgtagaaatgaaagtaaagatcatcagaaccattgaccagatgctgaacagtgagctgcagtggcccgttccagatatatatctcagggatctgaaggtggaggacattcctctagcgagaatcaccctgccagacttccgtttaccagaaatcgcaattccagaattcataatcccaactctcaaccttaatgattttcaagttcctgaccttcacataccagaattccagcttccccacatctcacacacaattgaagtacctacttttggcaagctatacagtattctgaaaatccaatctcctcttttcacattagatgcaaatgctgacatagggaatggaaccacctcagcaaacgaagcaggtatcgcagcttccatcactgccaaaggagagtccaaattagaagttctcaattttgattttcaagcaaatgcacaactctcaaaccctaagattaatccgctggctctgaaggagtcagtgaagttctccagcaagtacctgagaacggagcatgggagtgaaatgctgttttttggaaatgctattgagggaaaatcaaacacagtggcaagtttacacacagaaaaaaatacactggagcttagtaatggagtgattgtcaagataaacaatcagcttaccctggatagcaacactaaatacttccacaaattgaacatccccaaactggacttctctagtcaggctgacctgcgcaacgagatcaagacactgttgaaagctggccacatagcatggacttcttctggaaaagggtcatggaaatgggcctgccccagattctcagatgagggaacacatgaatcacaaattagtttcaccatagaaggacccctcacttcctttggactgtccaataagatcaatagcaaacacctaagagtaaaccaaaacttggtttatgaatctggctccctcaacttttctaaacttgaaattcaatcacaagtcgattcccagcatgtgggccacagtgttctaactgctaaaggcatggcactgtttggagaagggaaggcagagtttactgggaggcatgatgctcatttaaatggaaaggttattggaactttgaaaaattctcttttcttttcagcccagccatttgagatcacggcatccacaaacaatgaagggaatttgaaagttcgttttccattaaggttaacagggaagatagacttcctgaataactatgcactgtttctgagtcccagtgcccagcaagcaagttggcaagtaagtgctaggttcaatcagtataagtacaaccaaaatttctctgctggaaacaacgagaacattatggaggcccatgtaggaataaatggagaagcaaatctggatttcttaaacattcctttaacaattcctgaaatgcgtctaccttacacaataatcacaactcctccactgaaagatttctctctatgggaaaaaacaggcttgaaggaattcttgaaaacgacaaagcaatcatttgatttaagtgtaaaagctcagtataagaaaaacaaacacaggcattccatcacaaatcctttggctgtgctttgtgagtttatcagtcagagcatcaaatcctttgacaggcattttgaaaaaaacagaaacaatgcattagattttgtcaccaaatcctataatgaaacaaaaattaagtttgataagtacaaagctgaaaaatctcacgacgagctccccaggacctttcaaattcctggatacactgttccagttgtcaatgttgaagtgtctccattcaccatagagatgtcggcattcggctatgtgttcccaaaagcagtcagcatgcctagtttctccatcctaggttctgacgtccgtgtgccttcatacacattaatcctgccatcattagagctgccagtccttcatgtccctagaaatctcaagctttctcttccagatttcaaggaattgtgtaccataagccatatttttattcctgccatgggcaatattacctatgatttctcctttaaatcaagtgtcatcacactgaataccaatgctgaactttttaaccagtcagatattgttgctcatctcctttcttcatcttcatctgtcattgatgcactgcagtacaaattagagggcaccacaagattgacaagaaaaaggggattgaagttagccacagctctgtctctgagcaacaaatttgtggagggtagtcataacagtactgtgagcttaaccacgaaaaatatggaagtgtcagtggcaacaaccacaaaagcccaaattccaattttgagaatgaatttcaagcaagaacttaatggaaataccaagtcaaaacctactgtctcttcctccatggaatttaagtatgatttcaattcttcaatgctgtactctaccgctaaaggagcagttgaccacaagcttagcttggaaagcctcacctcttacttttccattgagtcatctaccaaaggagatgtcaagggttcggttctttctcgggaatattcaggaactattgctagtgaggccaacacttacttgaattccaagagcacacggtcttcagtgaagctgcagggcacttccaaaattgatgatatctggaaccttgaagtaaaagaaaattttgctggagaagccacactccaacgcatatattccctctgggagcacagtacgaaaaaccacttacagctagagggcctctttttcaccaacggagaacatacaagcaaagccaccctggaactctctccatggcaaatgtcagctcttgttcaggtccatgcaagtcagcccagttccttccatgatttccctgaccttggccaggaagtggccctgaatgctaacactaagaaccagaagatcagatggaaaaatgaagtccggattcattctgggtctttccagagccaggtcgagctttccaatgaccaagaaaaggcacaccttgacattgcaggatccttagaaggacacctaaggttcctcaaaaatatcatcctaccagtctatgacaagagcttatgggatttcctaaagctggatgtaaccaccagcattggtaggagacagcatcttcgtgtttcaactgcctttgtgtacaccaaaaaccccaatggctattcattctccatccctgtaaaagttttggctgataaattcattattcctgggctgaaactaaatgatctaaattcagttcttgtcatgcctacgttccatgtcccatttacagatcttcaggttccatcgtgcaaacttgacttcagagaaatacaaatctataagaagctgagaacttcatcatttgccctcaacctaccaacactccccgaggtaaaattccctgaagttgatgtgttaacaaaatattctcaaccagaagactccttgattcccttttttgagataaccgtgcctgaatctcagttaactgtgtcccagttcacgcttccaaaaagtgtttcagatggcattgctgctttggatctaaatgcagtagccaacaagatcgcagactttgagttgcccaccatcatcgtgcctgagcagaccattgagattccctccattaagttctctgtacctgctggaattgtcattccttcctttcaagcactgactgcacgctttgaggtagactctcccgtgtataatgccacttggagtgccagtttgaaaaacaaagcagattatgttgaaacagtcctggattccacatgcagctcaaccgtacagttcctagaatatgaactaaatgttttgggaacacacaaaatcgaagatggtacgttagcctctaagactaaaggaacatttgcacaccgtgacttcagtgcagaatatgaagaagatggcaaatatgaaggacttcaggaatgggaaggaaaagcgcacctcaatatcaaaagcccagcgttcaccgatctccatctgcgctaccagaaagacaagaaaggcatctccacctcagcagcctccccagccgtaggcaccgtgggcatggatatggatgaagatgacgacttttctaaatggaacttctactacagccctcagtcctctccagataaaaaactcaccatattcaaaactgagttgagggtccgggaatctgatgaggaaactcagatcaaagttaattgggaagaagaggcagcttctggcttgctaacctctctgaaagacaacgtgcccaaggccacaggggtcctttatgattatgtcaacaagtaccactgggaacacacagggctcaccctgagagaagtgtcttcaaagctgagaagaaatctgcagaacaatgctgagtgggtttatcaaggggccattaggcaaattgatgatatcgacgtgaggttccagaaagcagccagtggcaccactgggacctaccaagagtggaaggacaaggcccagaatctgtaccaggaactgttgactcaggaaggccaagccagtttccagggactcaaggataacgtgtttgatggcttggtacgagttactcaagaattccatatgaaagtcaagcatctgattgactcactcattgattttctgaacttccccagattccagtttccggggaaacctgggatatacactagggaggaactttgcactatgttcataagggaggtagggacggtactgtcccaggtatattcgaaagtccataatggttcagaaatactgttttcctatttccaagacctagtgattacacttcctttcgagttaaggaaacataaactaatagatgtaatctcgatgtatagggaactgttgaaagatttatcaaaagaagcccaagaggtatttaaagccattcagtctctcaagaccacagaggtgctacgtaatcttcaggaccttttacaattcattttccaactaatagaagataacattaaacagctgaaagagatgaaatttacttatcttattaattatatccaagatgagatcaacacaatcttcagtgattatatcccatatgtttttaaattgttgaaagaaaacctatgccttaatcttcataagttcaatgaatttattcaaaacgagcttcaggaagcttctcaagagttacagcagatccatcaatacattatggcccttcgtgaagaatattttgatccaagtatagttggctggacagtgaaatattatgaacttgaagaaaagatagtcagtctgatcaagaacctgttagttgctcttaaggacttccattctgaatatattgtcagtgcctctaactttacttcccaactctcaagtcaagttgagcaatttctgcacagaaatattcaggaatatcttagcatccttaccgatccagatggaaaagggaaagagaagattgcagagctttctgccactgctcaggaaataattaaaagccaggccattgcgacgaagaaaataatttctgattaccaccagcagtttagatataaactgcaagatttttcagaccaactctctgattactatgaaaaatttattgctgaatccaaaagattgattgacctgtccattcaaaactaccacacatttctgatatacatcacggagttactgaaaaagctgcaatcaaccacagtcatgaacccctacatgaagcttgctccaggagaacttactatcatcctctaattttttaaaagaaatcttcatttattcttcttttccaattgaactttcacatagcacagaaaaaattcaaactgcctatattgataaaaccatacagtgagccagccttgcagtaggcagtagactataagcagaagcacatatgaactggacctgcaccaaagctggcaccagggctcggaaggtctctgaactcagaaggatggcattttttgcaagttaaagaaaatcaggatctgagttattttgctaaacttgggggaggaggaacaaataaatggagtctttattgtgtatcata

SEQ ID NO: 487 - protein, 517 aa, Homo sapiens
MLRAAARFGPRLGRRLLSAAATQAVPAPNQQPEVFCNQIFINNEWHDAVSRKTFPTVNPSTGEVICQVAEGDKEDVDKAVKAARAAFQLGSPWRRMDASHRGRLLNRLADLIERDRTYLAALETLDNGKPYVISYLVDLDMVLKCLRYYAGWADKYHGKTIPIDGDFFSYTRHEPVGVCGQIIPWNFPLLMQAWKLGPALATGNVVVMKVAEQTPLTALYVANLIKEAGFPPGVVNIVPGFGPTAGAAIASHEDVDKVAFTGSTEIGRVIQVAAGSSNLKRVTLELGGKSPNIIMSDADMDWAVEQAHFALFFNQGQCCCAGSRTFVQEDIYDEFVERSVARAKSRVVGNPFDSKTEQGPQVDETQFKKILGYINTGKQEGAKLLCGGGIAADRGYFIQPTVFGDVQDGMTIAKEEIFGPVMQILKFKTIEEVVGRANNSTYGLAAAVFTKDLDKANYLSQALQAGTVWVNCYDVFGAQSPFGGYKMSGSGRELGEYGLQAYTEVKTVTVKVPQKNS

SEQ ID NO: 488 - DNA, 9561 bp, Homo sapiens
  source 1..9561: mol_type = other DNA
gagaccctagctctgctctcggtccgctcgctgtccgctagcccgctgcgatgttgcgcgctgccgcccgcttcgggccccgcctgggccgccgcctcttgtcagccgccgccacccaggccgtgcctgcccccaaccagcagcccgaggtcttctgcaaccagattttcataaacaatgaatggcacgatgccgtcagcaggaaaacattccccaccgtcaatccgtccactggagaggtcatctgtcaggtagctgaaggggacaaggaagatgtggacaaggcagtgaaggccgcccgggccgccttccagctgggctcaccttggcgccgcatggacgcatcacacaggggccggctgctgaaccgcctggccgatctgatcgagcgggaccggacctacctggcggccttggagaccctggacaatggcaagccctatgtcatctcctacctggtggatttggacatggtcctcaaatgtctccggtattatgccggctgggctgataagtaccacgggaaaaccatccccattgacggagacttcttcagctacacacgccatgaacctgtgggggtgtgcgggcagatcattccgtggaatttcccgctcctgatgcaagcatggaagctgggcccagccttggcaactggaaacgtggttgtgatgaaggtagctgagcagacacccctcaccgccctctatgtggccaacctgatcaaggaggctggctttccccctggtgtggtcaacattgtgcctggatttggccccacggctggggccgccattgcctcccatgaggatgtggacaaagtggcattcacaggctccactgagattggccgcgtaatccaggttgctgctgggagcagcaacctcaagagagtgaccttggagctgggggggaagagccccaacatcatcatgtcagatgccgatatggattgggccgtggaacaggcccacttcgccctgttcttcaaccagggccagtgctgctgtgccggctcccggaccttcgtgcaggaggacatctatgatgagtttgtggagcggagcgttgcccgggccaagtctcgggtggtcgggaacccctttgatagcaagaccgagcaggggccgcaggtggatgaaactcagtttaagaagatcctcggctacatcaacacggggaagcaagagggggcgaagctgctgtgtggtgggggcattgctgctgaccgtggttacttcatccagcccactgtgtttggagatgtgcaggatggcatgaccatcgccaaggaggagatcttcgggccagtgatgcagatcctgaagttcaagaccatagaggaggttgttgggagagccaacaattccacgtacgggctggccgcagctgtcttcacaaaggatttggacaaggccaattacctgtcccaggccctccaggcgggcactgtgtgggtcaactgctatgatgtgtttggagcccagtcaccctttggtggctacaagatgtcggggagtggccgggagttgggcgagtacgggctgcaggcatacactgaagtgaaaactgtcacagtcaaagtgcctcagaagaactcataagaatcatgcaagcttcctccctcagccattgatggaaagttcagcaagatcagcaacaaaaccaagaaaaatgatccttgcgtgctgaatatctgaaaagagaaatttttcctacaaaatctcttgggtcaagaaagttctagaatttgaattgataaacatggtgggttggctgagggtaagagtatatgaggaaccttttaaacgacaacaatactgctagctttcaggatgatttttaaaaaatagattcaaatgtgttatcctctctctgaaacgcttcctataactcgagtttataggggaagaaaaagctattgtttacaattatatcaccattaaggcaactgctacaccctgctttgtattctgggctaagattcattaaaaactagctgctcttaacttactgggtaactctttgtccatctcaataaccaaaggaaggtgggcatggtggctcacgcctgtaatcccagcactttgggaagccgaggcgggtggatcactcgaggtcaggagtttgagaccagcctggccaacgtagtgaaaccctgtctctcactaaaaatacacaaattaggcagtcatggtggctggcacctgtaatcccagctacttgggaggctgaggcaggaaaattggttgaacctgggaggtggaggttgcagtgagtggagatcatgccactgcactccagcctgggagtcagagcgagactccatctcaaaaaaagtaaataaatgaaatagcctaaggaaatgctggcaggcagtaatgatatggcacactggatatgatttctgcccctcctctgctgtgggtaaacagcttctgtttcatgcatttacttttttattttaattacaccaataagaatgtgcttgaatgtttcatgcatttaatttgtttcatgcatttaacttctggcctgtttacctgtagcaggctctgagatgtgctctagagacagaacctaaacatgatgcccaagagaggggagagatactgaatgtccaatgttctcaaattttttttttttttttttttgagacagggtcttgctctgccatccaggctggagtgcagtggcacgatcatagctcactgctgcctcgacctcctgggctcaaatgatcctcctgcttcagcttcctgggctaatgtttgtattttttgtggagatgggactttgttatgttgcccaggctgttttcaaactcctggactcaagtgatcctcccgccttagcctcctaaggtgctgggattacaggtgtgagccactgtgcccaattcagttctcagtaaaaacttgatcaggccaaatgaaagtgacatgggccaatttcataatagattgatttggaaaccagatgtcaatttacttactttaagtgagatctgtatcttcagtaaccagacctcttgagtctcccacccagaacactatcttcctctagtcaagatacctggcaaaggccgggcacagtggctcacgcctataattccagcactttgggaggccaaggtgggtgggtcacctgaggttgggagttcgagaccagcctgaccaacagggagaaaccccatctctactgaaaatacaaaaaaaaaaaaaaaaactagccgggcatggtggctcatgcctgtaatcccagctactcaggaggctgaggcaggagaattgcttgaacctgggaggcagaggttgcagtgagccaagattgctccattgtactccagcctgggcaacaagagagaaactccgtctcaaaatataaataaataagaaaaagaagaaatggaagctgggttcaagagggcaatcagcagtctctaccatcatgtgaaacaccactctgtgatttgagtcttgacaatgtattttctttttttttttcttcttttttttttgagactgagtctcggtctgtcgcccaggctggagtgcagtgacgtgatcttggctcactgcaacctctgcctcctgggttggagcaattctcctgcctcagcctcctgagtagctgggattacaggtgtgcgccaccatgcctggctaatttttgtatttttagtagagacggggttttgccatgttggccaggctggtgttgaaggcctgacctcaggtaatccacccacctctgcctcccagagtactgggattacaagtgtgagccaccgtgcccggccaactgtagggaccagccccacagggtcggtgggtttttctccccatgtgcggagacgagagattgtagaaataaagacacaagacaaagaggtaaaagaaaagacagctgggcttgggggaccactaccaccaagaggcggagaccggtagaggccccgaatgtctggctgcactgttatttattggatacaaagcaaaaggggcagggtaaagagtgtgagtcatctccaatgacaggtaaggtcacgtgggtcacgtgtccactggacagggggcccttccctgcctggcagccaaggcagagatagacagggagagagagagacagcttacgccattatttctgcgtatcagagacttttagtactttcactaattttgctactgttatctaaaaggcagagccaggtgtacaggatggaacatgaaggcagactaggagcgtgaccactgaagcacagcaccacagggagacggttaggcctccggataactaatgattaatgatattcatatataatcatgtctgtgatctagatctagtataactcttgttgttttatatattttattatactggaacagctcgtgccctcggtctcttgcctcagcacctggatggcttgccgcccacagccaacaatgtgttttcaatatgctccccaaactacagcaaactcctcttaactcgggatttagggtgatgccctacttatgcctaactttatcaccagcttaaccctcatctcattatataggatgatattacttctaggaagattttctatgtatggagggtgcatcatttaagagtattttaggccaggcactgtggctcatgcctgtaatcccagcattttgggaagctgaggtgggtgatttgcttcagcccacgagttcaagatcagcctggccaatatggtgaaaccccatctctacaaaaaaatacaaaaattagctgagcgtggtgatgtgtgcctgtggtcccagttactctggaggctgatgtgggaggatcacttgagcccaggaggtcaaggctgcagtgagctgtgattgcaccacttcactccagcccagagtgagaccccatctctgaaaaaaacacaaaaaacaagaaaagaatactgcaaagaaccttggtaggggtgaattggaaaaagtagagaaatgtaatatttctttcctgctgtactcactgtaactgtgagaggatcggctcttttaaccaacagataagaaaggaaatattagctatgaagaaatgtctatcaagttgattttgacaacctagacacattaatctccttgcacttttagtgacaggaacccattagaaccttaagcagctgtctgaagtaaaaacaaagctctcaggtgatgaaccacctaatctccctgggtattcggatgtgggtcagtcacaggagtattaggtgtaaagccgctgcttctgggtagagcctccacttgtggctgcacagagggcacagagagcttttccttcagcccggagaagcttcctaagtgtgggcgccaccttgtgggacatacattgaactacgacgctatttctccaagaattaacaggacagcccctcccaccggtgtccttccaacgatgttgcatacaatttggctgtacatttggcaggcagtgtaatgagggaatcaaagaccaggatcacatactggaaagaattgaaaacagagactcccaacaaaaacttgtacacggacgttcacagcagcactattcacgacagctcagagatggaatcaacccaaatatcagtcaatagatgaatggacagacaaaatgtgacatatccatgcagtggaatattatttagccataaaaaggaaggaagtgctgatgcatgttgcgatgtggatgaaccttgaaaacatgatgctgagtgaaagaagccagacacaaaaggagaaggactgtatgatttcacttataggaaatatccagaacaggcaaatctatatagagagaaggtcgattgctgggggccctgggaagggaccaagggggagtgacttctaatggtggggtgcccttttggggtgatgaaaatgttttggaaccagatacaggtggtggttgtacaacattgtgaatttactaaatgcaaccaaattgctcacttaaaaacaacaaattcaggccaggtgcagtggctcacacccgtaatcccagcactttgggaggccgaggtgggcggatcacatgaggtcaagagttcgagactagcctggccaacatggtgaaatcccatctcggccgggcgcggtggctcacgcctgtaatcccagcactttgggaggctgaggcgggtggatcacgaggtcaggagatcgagaccatcctggctaacacggtgaaaccccgtctctactaaaaatacaaaaaattagccaggcgtggtggtgggcgcctgtagtcccagctgatcgggaggctaaggcaggagaatggtgtgaacccaggaggcggagcttgcagtgagccgagatcgcgccactgcactctatcctgggtgacagagtgagactctgtctccaaaaaaaaaaaaagaaaccccatctctacccaaaatacaaaaattagctgggcatggtggctggcacctgtaatcccagctactcaggaggctgaggcaggagaattggttgaacctgggaggcagaggttgcagtgagctaagatcgcaccactgcactccagcctgggtgacagaacgagactgtctcaaaaaaaaaaaaaaaaaaaagtggccaggtggtgccatggctcatgcctgtaatctcagcattttgggatactgaggcgggtggattacctgaggccaggagttcgagatcagcctggccaacatgatgaaaacccatctctgctaaaaatacaaaaaattggctgggcttggtagcatgtgcccagctacttgggaggctgagacaggagaatcgcttgaacctgggaggcagaggttgcggttagccaagattgtgccactgcactccatgggtgacacagagagactctgtctcaaaaaaaaaaaaaaaaaagtaaatgctatgttatgtgaatttcacctcaactgaaaaaaacagggtcccagagctggtcaggggaacttggacaaaccacacaacttctgagcttccatttcctcacaatctctgcagtcacttccaactctcatttggcttattctgtgaaggataaaacagagctgacatttgttcatttgtattgattttatttacatttttcaaaaggaaatagatgcagatggtatagaaagtttcagtgaaatgtaaatctgatgcccaatcctgtggccccaagaagtattaactgtgcacccactacatgccaggaactgtacttggagccttctcaagagcttcttaacaatattttcattttttatattttttaatgacagggtctaactccgtcgtccaggctggagtgcagtggtgcgatcatagctcactgcagcctctacctcctaggctcaggtgattcttctgcctcagcctcccaaatagctggtactacaagcatgtgccaccacagtcagctaattatttttggagagtcagggtttcactatgtagctcaggctggtcttcagctcctggcttgaagtgatcctcctgccttggcacatagaaggggttacaatatacatatattagagtgagagcatagatgtgatgcctggcgatatggcttacttatgagacagcacctgacctacagccatctatgactcctactgtatcttccatgccaggagtaagggtgaggatacctggcaataataaaaataataacctgagagtctaatggcttattttttgtagagatggggtctcactgtgttgtttaggctggtcttgaacttctgggctcaagtgatcctcccacctcagcctcctgagtagctgggattataggcgtgcactaccatgcatatatatatatatttttttttttttttgagagagagagagagagatggagtcttgctatgttgctcaggctggtctcgaactcctggcctcaagtcatcctgctggcttggcctctcaagtgctaggattacaggcatgagacactgggcacagccctaatagcttatttttaaagctatatcaaaatgtcatgcacctgaacatttgaagtaacctctctgatagtacggatatttatcccctcaaaatctcatgttaaaatgtaatcttcagtgttggaggtggggcaaggtgtgaggtgttaggatcatgggggtggatccctcatgaatggcttggtgtcctcccccatggtaatgagttcactcaagagctggttgtttaaaaggtgacgtggacctaatccctgttggactgaacaaaaggggacgaacacagcaataaagataaagaccaaagagtatatttggaagaaggggtcagggggctccttgcttctagtgaaaaagggccctgagctttagtgccctttgtatttattgggtaaaggagatagggagaagggggggtggttgtcggtcagcagcttgattcacagcaggctcacaagattgcattctttgaacagtaggctctagatgtctcagtagataacctcaaagagcatggcgccagggagtgattgccctcagcgaaccttctggcggctgaagcagaagtgagtttgcccacattctgcatttatgataaacagtttgctgtttgatcatatagcctcagtggaatgctgagttggtcacaacccatgggcattcagctctctacatttccccctttctgtttatgaattaattgaaagaatgtaaggccaggctgggcagctctcattttctgattggcagtccatccaattttacagactatgaacagaagacagagacaaaacaacattattccaaggactacatataagatgttaatgtggtgctttagacaggtccaagggttgaggctctccaggccttgctggaatttggtctagtcttctaaagaaggctgaaactcttgagtttgtttatttaaatcaagaattttgttttgtaattcaccgatatcaaaggtgatgttggatgtgcaagctccctgcaaatgggctttcacaaggtcccatggatactcactttggttatattctaagttggttacacaaatatgagtgtgattaaaatgatggtgcaattgctgttgcaattgcaagctttgtacttgttctcctaactgtagagccgtggatttcaacaatgccacttcagtttgtaactcagtgttaattttattctgaagtggccatgcttggttggctatacgcatccagttttccatgtactgagttgtttgaatagaactatgcaaagctacagaggacatcacaacggaagttattaatgtgaccaaggaaacaatagcaaaaattatcatgcctaaggctctatgggcacaatgagtaagttgagttagaagatgtttcatgaagtgcaaagcaggtgtggtagcccaaggctgggacagattaacaggaatccatagcccagggatgcgacccaaaattatcaaagtagagacattatgtgtttgcaatgtgctatgattaatgcagtgacataactggcaagatttacaggtcaattggatattgtttacctggagctggtccttcttagttgccaaaaaagacataaggattaaaaagacaaaccataaa

SEQ ID NO: 489 - DNA, 303 bp, Homo sapiens
  source 1..303: mol_type = other DNA
atgtctacaggtccaactgctgccactggcagtaatcgaagacttcagcagacacaaaatcaagtagatgaggtggtggacataatgcgagttaacgtggacaaggttctggaaagagaccagaagctctctgagttagacgaccgtgcagacgcactgcaggcaggcgcttctcaatttgaaacgagcgcagccaagttgaagaggaaatattggtggaagaattgcaagatgtgggcaatcgggattactgttctggttatcttcatcatcatcatcatcgtgtgggttgtctcttcatga

SEQ ID NO: 490 - DNA, 2178 bp, Homo sapiens
  source 1..2178: mol_type = other DNA
gtcccacccatctccctggcctccggtcccaacttcgcttctctgctgaccctctctcgtcgccgctgccgccgccgcagctgccaaaatgtctacaggtccaactgctgccactggcagtaatcgaagacttcagcagacacaaaatcaagtagatgaggtggtggacataatgcgagttaacgtggacaaggttctggaaagagaccagaagctctctgagttagacgaccgtgcagacgcactgcaggcaggcgcttctcaatttgaaacgagcgcagccaagttgaagaggaaatattggtggaagaattgcaagatgtgggcaatcgggattactgttctggttatcttcatcatcatcatcatcgtgtgggttgtctcttcatgaagaaccagcggaactcaaaactgctgttcaagaaacctcttcaagacttttgacttagaacctgctatattatcaagcttacctactgttatctctaaaattttttttgtgttaatgtaaagttgaatttctaggaaacgtgcctttgttttttaatatgcactccaaattagaaggccggccccgtccacattttgcacagtgcctttacagatttacgtatgggctgatgaagaggccttcttaagttccagagtgctataatctagatgtaatgttgtcactaattaattgccattactcccagttagttacccttgtcatttggcattattttcagaaccacattttaaacctttgggtaatcagatttccaacttatgccttccagaaaaaaacactactgcctaacacaaatctgtgataacaacaggctgtgccttattttgataattttctgattccctagaagagaaccctctactttttgtaagcactactgactctcgctgtatttaagatgctggtgaagagcttttgctcttgcattagatttgaagatgtttacattgttgttattgttatgtatcacttgctaaaaatattgttttaatcagagataacctctttaaaaaaatttttaaagaactatggctatgaccaaagcttctattttgccaaaaagttaaataccgataaaatggccttaagtgtattcctgacagttaaattcagaaacgtgccaaatggaactcaaggtgccccttcagaattaaaatcattaccttgtgtgtgaaccttctacatcttcataggcctttcttccttttgaaaggctgtagacagtgtggctccccttctgattcagtattttgcatgggggttagagaaggtttgaggtagactctgaccgtctcataaaagagttctacccagcagttggcagattatcagctgtggactccagcatgtttctgataattatgcaagcaacaattctgtagcctcaagtaagaccacctgtgaacttgatcattatctggcccaaatatgaagataaactataactttggagtttgtttcctatttgtattcacattctgcttcctaaatcagttttctaaattatgcctgcaattaggcattggtcaggggtgaatggctcttttcacagagagtagccaaccagagacctttgctttgatatcatcaactgcagagaatgctgttgatgggaatgctggaagcagaaactttgtcatcggaaaaacttttcttgtatgcatgagactcaacatcaggatccacagcttaaagatgggaattcaggtatgaaagaaaacaggcaaggaggcactgagggagaaagacacagactttatcgctctgtggctcattgttactggaatattctaaaactcttgttcacatgctattatgacttataaagcagcaacagctgaggcgcaccaggacacagcttccatttctttaacgtctgttcccttaacatcgctgaaatgatttactgttgaagagatgccttgcggtgtggccagctgtgaggagaaagcagctggcagtgttaggacattagtccaccttcagcgcagggtctctggccgggtctgactcagaaaccttggtactcgccccttggccacagtgcccagacccatgtaacccactggctcctgcattaacccagaaatacctcgcttctatctgtgcacttagctgggaacttacccactgtaatcacctaaataaagtgtttataaacatga

SEQ ID NO: 491 - protein, 100 aa, Homo sapiens
MSTGPTAATGSNRRLQQTQNQVDEVVDIMRVNVDKVLERDQKLSELDDRADALQAGASQFETSAAKLKRKYWWKNCKMWAIGITVLVIFIIIIIVWVVSS

SEQ ID NO: 492 - DNA, 1578 bp, Homo sapiens
  source 1..1578: mol_type = other DNA
atggcggggctctggctggggctcgtgtggcagaagctgctgctgtggggcgcggcgagtgccctttccctggccggcgccagtctggtcctgagcctgctgcagagggtggcgagctacgcgcggaaatggcagcagatgcggcccatccccacggtggcccgcgcctacccactggtgggccacgcgctgctgatgaagccggacgggcgagaattttttcagcagatcattgagtacacagaggaataccgccacatgccgctgctgaagctctgggtcgggccagtgcccatggtggccctttataatgcagaaaatgtggaggtaattttaactagttcaaagcaaattgacaaatcctctatgtacaagtttttagaaccatggcttggcctaggacttcttacaagtactggaaacaaatggcgctccaggagaaagatgttaacacccactttccattttaccattctggaagatttcttagatatcatgaatgaacaagcaaatatattggttaagaaacttgaaaaacacattaaccaagaagcatttaactgctttttttacatcactctttgtgccttagatatcatctgtgaaacagctatggggaagaatattggtgctcaaagtaatgatgattccgagtatgtccgtgcagtttatagaatgagtgagatgatatttcgaagaataaagatgccctggctttggcttgatctctggtaccttatgtttaaagaaggatgggaacacaaaaagagccttcagatcctacatacttttaccaacagtgtcatcgctgaacgggccaatgaaatgaacgccaatgaagactgtagaggtgatggcaggggctctgccccctccaaaaataaacgcagggcctttcttgacttgcttttaagtgtgactgatgacgaagggaacaggctaagtcatgaagatattcgagaagaagttgacaccttcatgtttgaggggcacgatacaactgcagctgcaataaactggtccttatacctgttgggttctaacccagaagtccagaaaaaagtggatcatgaattggatgacgtgtttgggaagtctgaccgtcccgctacagtagaagacctgaagaaacttcggtatctggaatgtgttattaaggagacccttcgcctttttccttctgttcctttatttgcccgtagtgttagtgaagattgtgaagtggcaggttacagagttctaaaaggcactgaagccgtcatcattccctatgcattgcacagagatccgagatacttccccaaccccgaggagttccagcctgagcggttcttccccgagaatgcacaagggcgccatccatatgcctacgtgcccttctctgctggccccaggaactgtataggtcaaaagtttgctgtgatggaagaaaagaccattctttcgtgcatcctgaggcacttttggatagaatccaaccagaaaagagaagagcttggtctagaaggacagttgattcttcgtccaagtaatggcatctggatcaagttgaagaggagaaatgcagatgaacgctaa

SEQ ID NO: 493 - protein, 525 aa, Homo sapiens
MAGLWLGLVWQKLLLWGAASALSLAGASLVLSLLQRVASYARKWQQMRPIPTVARAYPLVGHALLMKPDGREFFQQIIEYTEEYRHMPLLKLWVGPVPMVALYNAENVEVILTSSKQIDKSSMYKFLEPWLGLGLLTSTGNKWRSRRKMLTPTFHFTILEDFLDIMNEQANILVKKLEKHINQEAFNCFFYITLCALDIICETAMGKNIGAQSNDDSEYVRAVYRMSEMIFRRIKMPWLWLDLWYLMFKEGWEHKKSLQILHTFTNSVIAERANEMNANEDCRGDGRGSAPSKNKRRAFLDLLLSVTDDEGNRLSHEDIREEVDTFMFEGHDTTAAAINWSLYLLGSNPEVQKKVDHELDDVFGKSDRPATVEDLKKLRYLECVIKETLRLFPSVPLFARSVSEDCEVAGYRVLKGTEAVIIPYALHRDPRYFPNPEEFQPERFFPENAQGRHPYAYVPFSAGPRNCIGQKFAVMEEKTILSCILRHFWIESNQKREELGLEGQLILRPSNGIWIKLKRRNADER

SEQ ID NO: 494 - DNA, 2406 bp, Homo sapiens
  source 1..2406: mol_type = other DNA
atgctgcaaaacgtgactccccacaataagctccctggggaagggaatgcagggttgctggggctgggcccagaagcagcagcaccagggaagaggattcgaaaaccctctctcttgtatgagggctttgagagccccacaatggcttcggtgcctgctttgcaacttacccctgccaacccaccacccccggaggtgtccaatcccaaaaagccaggacgagttaccaaccagctgcaatacctacacaaggtagtgatgaaggctctgtggaaacatcagttcgcatggccattccggcagcctgtggatgctgtcaaactgggtctaccggattatcacaaaattataaaacagcctatggacatgggtactattaagaggagacttgaaaacaattattattgggctgcttcagagtgtatgcaagattttaataccatgttcaccaactgttacatttacaacaagcccactgatgatattgtcctaatggcacaaacgctggaaaagatattcctacagaaggttgcatcaatgccacaagaagaacaagagctggtagtgaccatccctaagaacagccacaagaagggggccaagttggcagcgctccagggcagtgttaccagtgcccatcaggtgcctgccgtctcttctgtgtcacacacagccctgtatactcctccacctgagatacctaccactgtcctcaacattccccacccatcagtcatttcctctccacttctcaagtccttgcactctgctggacccccgctccttgctgttactgcagctcctccagcccagccccttgccaagaaaaaaggcgtaaagcggaaagcagatactaccacccctacacctacagccatcttggctcctggttctccagctagccctcctgggagtcttgagcctaaggcagcacggcttccccctatgcgtagagagagtggtcgccccatcaagcccccacgcaaagacttgcctgactctcagcaacaacaccagagctctaagaaaggaaagctttcagaacagttaaaacattgcaatggcattttgaaggagttactctctaagaagcatgctgcctatgcttggcctttctataaaccagtggatgcttctgcacttggcctgcatgactaccatgacatcattaagcaccccatggacctcagcactgtcaagcggaagatggagaaccgtgattaccgggatgcacaggagtttgctgctgatgtacggcttatgttctccaactgctataagtacaatcccccagatcacgatgttgtggcaatggcacgaaagctacaggatgtatttgagttccgttatgccaagatgccagatgaaccactagaaccagggcctttaccagtctctactgccatgccccctggcttggccaaatcgtcttcagagtcctccagtgaggaaagtagcagtgagagctcctctgaggaagaggaggaggaagatgaggaggacgaggaggaagaagagagtgaaagctcagactcagaggaagaaagggctcatcgcttagcagaactacaggaacagcttcgggcagtacatgaacaactggctgctctgtcccagggtccaatatccaagcccaagaggaaaagagagaaaaaagagaaaaagaagaaacggaaggcagagaagcatcgaggccgagctggggccgatgaagatgacaaggggcctagggcaccccgcccacctcaacctaagaagtccaagaaagcaagtggcagtgggggtggcagtgctgctttaggcccttctggctttggaccttctggaggaagtggcaccaagctccccaaaaaggccacaaagacagccccacctgccctgcctacaggttatgattcagaggaggaggaagagagcaggcccatgagttacgatgagaagcggcagctgagcctggacatcaacaaattacctggggagaagctgggccgagttgtgcatataatccaagccagggagccctctttacgtgattcaaacccagaagagattgagattgattttgaaacactcaagccatccacacttagagagcttgagcgctatgtcctttcctgcctacgtaagaaaccccggaagccctacaccattaagaagcctgtgggaaagacaaaggaggaactggctttggagaaaaagcgggaattagaaaagcggttacaagatgtcagcggacagctcaattctactaaaaagccccccaagaaagcgaatgagaaaacagagtcatcctctgcacagcaagtagcagtgtcacgccttagcgcttccagctccagctcagattccagctcctcctcttcctcgtcgtcgtcttcagacaccagtgattcagactcaggctaa

SEQ ID NO: 495 - protein, 801 aa, Homo sapiens
MLQNVTPHNKLPGEGNAGLLGLGPEAAAPGKRIRKPSLLYEGFESPTMASVPALQLTPANPPPPEVSNPKKPGRVTNQLQYLHKVVMKALWKHQFAWPFRQPVDAVKLGLPDYHKIIKQPMDMGTIKRRLENNYYWAASECMQDFNTMFTNCYIYNKPTDDIVLMAQTLEKIFLQKVASMPQEEQELVVTIPKNSHKKGAKLAALQGSVTSAHQVPAVSSVSHTALYTPPPEIPTTVLNIPHPSVISSPLLKSLHSAGPPLLAVTAAPPAQPLAKKKGVKRKADTTTPTPTAILAPGSPASPPGSLEPKAARLPPMRRESGRPIKPPRKDLPDSQQQHQSSKKGKLSEQLKHCNGILKELLSKKHAAYAWPFYKPVDASALGLHDYHDIIKHPMDLSTVKRKMENRDYRDAQEFAADVRLMFSNCYKYNPPDHDVVAMARKLQDVFEFRYAKMPDEPLEPGPLPVSTAMPPGLAKSSSESSSEESSSESSSEEEEEEDEEDEEEEESESSDSEEERAHRLAELQEQLRAVHEQLAALSQGPISKPKRKREKKEKKKKRKAEKHRGRAGADEDDKGPRAPRPPQPKKSKKASGSGGGSAALGPSGFGPSGGSGTKLPKKATKTAPPALPTGYDSEEEEESRPMSYDEKRQLSLDINKLPGEKLGRVVHIIQAREPSLRDSNPEEIEIDFETLKPSTLRELERYVLSCLRKKPRKPYTIKKPVGKTKEELALEKKRELEKRLQDVSGQLNSTKKPPKKANEKTESSSAQQVAVSRLSASSSSSDSSSSSSSSSSSDTSDSDSG

SEQ ID NO: 496 - DNA, 768 bp, Homo sapiens
  source 1..768: mol_type = other DNA
atgatcctaaacaaagctctgctgctgggggccctcgccctgactgccgtgatgagcccctgtggaggtgaagacattgtggctgaccatgttgcctcctatggtgtgaacttctaccagtctcacggtccctctggccagtacacccatgaatttgatggagacgaggagttctatgtggacctggagacgaaagagactgtctggcagttgcctatgtttagcaaatttataagttttgacccgcagagtgcactgagaaatatggctgtgggaaaacacaccttggaattcatgatgagacagtccaactctaccgctgccaccaatgaggttcctgaggtcacagtgttttccaagtttcctgtgacgctgggtcagcccaacaccctcatctgtcttgtggacaacatctttcctcctgtggtcaacatcacctggctgagcaatgggcactcagtcacagaaggtgtttctgagaccagcttcctctccaagagtgatcattccttcttcaagatcagttacctcaccttcctcccttctgctgatgagatttatgactgcaaggtggagcactggggcctggacgagcctcttctgaaacactgggagcctgagattccagcccctatgtcagagctcacagagactttggtctgcgccctggggttgtctgtgggcctcatgggcattgtggtgggcactgtcttcatcatccaaggcctgcgttcagttggtgcttccagacaccaagggctcttatga

SEQ ID NO: 497 - protein, 255 aa, Homo sapiens
MILNKALLLGALALTAVMSPCGGEDIVADHVASYGVNFYQSHGPSGQYTHEFDGDEEFYVDLETKETVWQLPMFSKFISFDPQSALRNMAVGKHTLEFMMRQSNSTAATNEVPEVTVFSKFPVTLGQPNTLICLVDNIFPPVVNITWLSNGHSVTEGVSETSFLSKSDHSFFKISYLTFLPSADEIYDCKVEHWGLDEPLLKHWEPEIPAPMSELTETLVCALGLSVGLMGIVVGTVFIIQGLRSVGASRHQGLL

SEQ ID NO: 498 - DNA, 4875 bp, Homo sapiens
  source 1..4875: mol_type = other DNA
atggccggccagggggactgctgcgtcaaggtggccgtcaggatccggccccagctgtcgaaggagaagattgagggctgtcacatctgtacctctgttaccccgggagagccccaggtcctgctggggaaggacaaggccttcacctatgactttgtcttcgacctggacacctggcaagaacagatctattccacctgtgtgagcaagctcatcgagggctgcttcgagggctataatgccacggtgctggcctatgggcagacgggggccgggaagacgtacaccatgggcactggctttgacatggcaacgtcggaggaggagcagggcatcatcccgagggccatcgcacacctctttgggggcattgccgagcgcaagcgccgggcacaggagcagggcgtggctggacctgagttcaaagtcagcgcccagtttctggagctctacaacgaggagatccttgacctgtttgacagcacccgtgaccctgacacccgccaccgcaggtccaacatcaagatccacgaggacgcaaacggtggcatctacaccactggcgtcacttctcgcctcatccactcccaggaggagctgatccagtgcctgaagcagggggccctgtcccgcaccacagccagcacccagatgaacgtgcagagctcacgctcccacgccatcttcaccatccacctgtgccagatgcgcatgtgcacccagcccgacctggtgaatgaggcggtgactgggcttcctgatggtacacctccctcgagtgagtatgagacactcactgctaagtttcactttgtggacctggccggctcagagcggctgaagcggacaggggctactggcgagcgggccaaggagggcatctccatcaactgtggcctgctggccttgggcaatgtgatcagcgccttaggggaccagagcaagaaggtggtgcacgttccctacagggactccaagctcactcggctcctccaggattcgctggggggcaacagccagaccatcatgatcgcctgtgtgagcccctcagaccgagatttcatggagaccctcaacacactcaaatatgccaatcgggcccgcaacatcaagaacaaggtggtagtgaaccaggacaagaccagccagcaaatcagtgcactgcgggctgagattgctcggctgcagatggagctgatggagtataaggcgggcaagcgagtgataggagaggatggcgctgagggctatagtgatctgttccgagagaatgccatgctacagaaggagaatggggccctgcggctgcgggtgaaagccatgcaggaggccatcgatgccatcaacaaccgcgtcacccagctcatgagccaggaggccaacctgctgctagccaaggccggcgatggcaatgaggccattggtgcgctgatccagaactacatccgggagatcgaggagctacggactaagcttctagagagtgaagccatgaacgagtccctgcgccgcagcctctcacgggcctcggctaggagcccctactccctgggtgcttctccagccgccccggccttcgggggcagccctgccagctccatggaggatgcctcggaggtgatccgcagggccaagcaggacctggagcggctaaagaagaaggaggtcaggcagcggaggaagagccccgagaaggaagccttcaaaaagagggcaaaactccaacaggagaacagcgaggagacggatgagaacgaggcggaggaggaggaggaagagcgagacgagagtggctgtgaggaggaggaagggcgcgaggatgaagatgaggactcgggcagtgaagagagcctggtggactcagactcagaccccgaggagaaggaggtgaacttccaggcggacctggccgacctgacttgtgagatcgaaatcaagcagaagctgatcgacgagctggagaacagccagcggcggttgcagacgctcaagcaccagtatgaggaaaagctgattctgctgcagaacaagatccgagacacacagctggagcgcgaccgtgtgctgcagaacctcagcaccatggagtgctatactgaggagaaggccaacaagatcaaggcagactatgagaagaggctgcgggagatgaaccgggacctgcagaagctgcaggccgcccagaaagagcacgcccggctgcttaagaaccagtcgcgctacgagagggagctgaagaagctacaggccgaggtggctgagatgaagaaggccaaggtggccctgatgaagcagatgcgtgaggagcaacagcggcggcggctagtggagaccaagaggaaccgggagatcgcacagctcaagaaggagcagcggcgacaggagtttcagatccgagctctggagtcccagaagcggcagcaggagatggtcctgaggaggaagacccaggaggtttctgcactgaggcgcctggccaagcccatgtctgagcgggtggcagggcgtgcaggactaaagccacccatgctggactctggggctgaggtgtcggccagcactacctcatctgaggctgaatcaggggcccgctctgtctccagcatcgtgcgccagtggaaccgcaaaatcaaccacttcttgggggaccatcctgcgcccactgtcaatggcacccgtcctgcccgaaagaagttccagaagaagggggccagccagagcttcagtaaggcggcaaggctcaagtggcagtccctggagcgacggatcattgacatcgtcatgcagagaatgaccattgtcaacctggaggctgacatggagcggctcatcaagaaaagggaggagctgttcctcctgcaggaggcactgcggaggaagcgggagcggctgcaggctgagagccccgaggaagagaaggggctgcaggagctggctgaggagatcgaggtgctggcagccaacattgactacatcaatgacggcatcaccgactgccaggccaccatcgtgcagctggaggagaccaaggaggagctggactccacagacacatccgtggtcatcagctcctgctccctggctgaagcccgcctcctgctagacaacttcctcaaggcatccattgacaaggggctgcaagtggcacaaaaggaagcccagatccggctgttggagggccgactgaggcagacggatatggcaggctcctcccagaaccatctgctcctggacgccctgcgtgagaaggctgaagctcaccccgagctgcaggccctcatctacaatgtgcagcaggagaatggctacgccagcacagatgaggagatctcagagttctctgagggcagcttctcccagtcattcaccatgaaaggctccaccagccatgacgatttcaagttcaagagcgagcccaaactgtctgcccaaatgaaagctgtgtcggctgagtgcctgggccccccactggatatctccaccaagaacatcaccaagtccctggcctccctcgttgagatcaaagaggacggagtgggcttctctgtccgagacccctattaccgggacagggtctcgcgcaccgtcagtctgcctacccggggcagcactttccctaggcaatctcgagccacagagacgtccccgctgacgagaaggaagtcctacgaccgagggcagcccattaggtccacagatgtgggattcacacccccatcatcccctcccactcggccccgcaatgaccgcaatgtcttctctcgtctcaccagtaatcagagccaggggtcagcgctggacaagggcatcatctccccggttggaggagccaagggtgcacggacggccccactgcagtgtgtctccatggccgaaggccacaccaagcccatcctctgcctggatgccacagatgagttgctattcacagggtccaaagaccgaagctgcaagatgtggaacttggttacgggacaggagatcgcagctctaaagggccaccccaacaacgtggtctccatcaagtactgcagccactcggggcttgtgttctccgtgtccacctcctacatcaaggtgtgggacatccgggactcagccaagtgcattcggactctcacgtcctcgggccaggtgatctcaggggatgcctgtgccgccacatccacccgtgccatcaccagtgctcagggcgagcatcagatcaaccagatcgccctcagcccttcgggcaccatgctgtacgccgcctcgggcaatgccgtccgcatctgggagcttagcaggttccagcctgtcggcaagctgactggccacatcggccctgtgatgtgcctgacggtcacccagacggccagccagcatgacctcgtggtgactggctccaaggaccactacgttaagatgttcgagctgggcgagtgtgtgacgggcaccatcggccccactcacaacttcgagcccccgcactacgatggcatcgagtgtctcgccatccagggagacatcctgttcagtggctcccgagataacggcatcaagaagtgggacctagaccagcaggagctcatccagcaaatccccaatgcgcacaaggactgggtgtgcgccctggccttcatcccgggccgccccatgctgctcagcgcctgccgtgcgggtgtcatcaaggtctggaacgtggacaacttcacacccatcggtgagatcaagggccacgacagtcccatcaatgccatctgcaccaatgccaagcatatcttcacagcctccagtgactgccgggtaaagttgtggaattacgtccctggactcaccccctgccttcctcgccgagtcctggccataaagggccgcgccaccaccctgccctga

SEQ ID NO: 499 - protein, 1624 aa, Homo sapiens
MAGQGDCCVKVAVRIRPQLSKEKIEGCHICTSVTPGEPQVLLGKDKAFTYDFVFDLDTWQEQIYSTCVSKLIEGCFEGYNATVLAYGQTGAGKTYTMGTGFDMATSEEEQGIIPRAIAHLFGGIAERKRRAQEQGVAGPEFKVSAQFLELYNEEILDLFDSTRDPDTRHRRSNIKIHEDANGGIYTTGVTSRLIHSQEELIQCLKQGALSRTTASTQMNVQSSRSHAIFTIHLCQMRMCTQPDLVNEAVTGLPDGTPPSSEYETLTAKFHFVDLAGSERLKRTGATGERAKEGISINCGLLALGNVISALGDQSKKVVHVPYRDSKLTRLLQDSLGGNSQTIMIACVSPSDRDFMETLNTLKYANRARNIKNKVVVNQDKTSQQISALRAEIARLQMELMEYKAGKRVIGEDGAEGYSDLFRENAMLQKENGALRLRVKAMQEAIDAINNRVTQLMSQEANLLLAKAGDGNEAIGALIQNYIREIEELRTKLLESEAMNESLRRSLSRASARSPYSLGASPAAPAFGGSPASSMEDASEVIRRAKQDLERLKKKEVRQRRKSPEKEAFKKRAKLQQENSEETDENEAEEEEEERDESGCEEEEGREDEDEDSGSEESLVDSDSDPEEKEVNFQADLADLTCEIEIKQKLIDELENSQRRLQTLKHQYEEKLILLQNKIRDTQLERDRVLQNLSTMECYTEEKANKIKADYEKRLREMNRDLQKLQAAQKEHARLLKNQSRYERELKKLQAEVAEMKKAKVALMKQMREEQQRRRLVETKRNREIAQLKKEQRRQEFQIRALESQKRQQEMVLRRKTQEVSALRRLAKPMSERVAGRAGLKPPMLDSGAEVSASTTSSEAESGARSVSSIVRQWNRKINHFLGDHPAPTVNGTRPARKKFQKKGASQSFSKAARLKWQSLERRIIDIVMQRMTIVNLEADMERLIKKREELFLLQEALRRKRERLQAESPEEEKGLQELAEEIEVLAANIDYINDGITDCQATIVQLEETKEELDSTDTSVVISSCSLAEARLLLDNFLKASIDKGLQVAQKEAQIRLLEGRLRQTDMAGSSQNHLLLDALREKAEAHPELQALIYNVQQENGYASTDEEISEFSEGSFSQSFTMKGSTSHDDFKFKSEPKLSAQMKAVSAECLGPPLDISTKNITKSLASLVEIKEDGVGFSVRDPYYRDRVSRTVSLPTRGSTFPRQSRATETSPLTRRKSYDRGQPIRSTDVGFTPPSSPPTRPRNDRNVFSRLTSNQSQGSALDKGIISPVGGAKGARTAPLQCVSMAEGHTKPILCLDATDELLFTGSKDRSCKMWNLVTGQEIAALKGHPNNVVSIKYCSHSGLVFSVSTSYIKVWDIRDSAKCIRTLTSSGQVISGDACAATSTRAITSAQGEHQINQIALSPSGTMLYAASGNAVRIWELSRFQPVGKLTGHIGPVMCLTVTQTASQHDLVVTGSKDHYVKMFELGECVTGTIGPTHNFEPPHYDGIECLAIQGDILFSGSRDNGIKKWDLDQQELIQQIPNAHKDWVCALAFIPGRPMLLSACRAGVIKVWNVDNFTPIGEIKGHDSPINAICTNAKHIFTASSDCRVKLWNYVPGLTPCLPRRVLAIKGRATTLP

SEQ ID NO: 500 - DNA, 3210 bp, Homo sapiens
  source 1..3210: mol_type = other DNA
atgctgaggatgcggaccgcgggatgggcgcgcggctggtgcttgggctgctgcctcctcctgccgctctcgctcagcctggcggccgccaagcagctcctccggtaccggctggccgaggagggccccgccgacgtccgcatcggcaacgtggcttcagacctgggcatcgtgaccggatcgggtgaggtgactttcagcctggagtccggttccgagtacctgaagatcgacaacctcactggcgagctgagcacgagcgagcggcgcatcgaccgcgagaagctgccccagtgtcagatgatcttcgacgagaacgagtgcttcctggacttcgaggtgtcggtgatcgggccctcgcagagctgggtggacctgtttgagggtcaggtcatcgtgcttgacatcaacgacaacacgcccaccttcccgtcgcccgtgctcacgctcacggtggaggagaatcggccggtgggcacactttacctgctgcccacagccaccgaccgcgacttcggccgcaacggcatcgagcgctacgagctgctccaggagcccggaggcggcggcagcggcggcgagagccggcgcgccggggcggccgacagcgccccctaccccgggggcggcgggaacggcgcgagcggcggcggctcgggaggctccaagcggcggctggacgcatcagagggcggcggcggcaccaaccccggcggccgcagcagcgtgttcgagctgcaggtggcggacaccccggacggcgagaagcagccgcagctgatcgtgaagggggcgctggaccgcgagcagcgcgactcctacgagctgaccctgcgagtgcgcgacggcggcgacccgcctcgctcctcgcaggccatcctacgggtcctcatcaccgacgtgaacgacaacagcccccgcttcgagaagagcgtgtacgaggccgacttggctgagaacagcgccccggggacccccatcctgcaactgcgcgcagccgacttggacgtgggggtcaacgggcagatcgaatacgtgttcggggcggccaccgagtcggtgaggcggctgctgcgccttgacgagacgtccggctggctcagcgtcctgcaccggatcgaccgcgaggaggtgaaccagctgcgcttcacggtcatggcccgcgaccgcgggcagccccccaagaccgacaaggccaccgtggtccttaacatcaaagacgagaacgacaacgtgccgtccattgaaatccgcaagattgggcgcatccccctcaaggacggggtggccaacgtggccgaggacgttctggtcgacacccccatcgctctggtgcaggtgtccgaccgagaccaaggcgagaacggggtggtcacctgcaccgtggtgggcgacgtgcccttccagctcaagccagccagcgacaccgagggcgaccagaacaagaaaaagtacttcttgcacacctcgacccctctggactatgaggccacccgggagttcaacgtggtcatcgtggcggtggactcaggcagccccagcctctcgagcaacaactccctgattgtcaaggtgggagacaccaacgacaacccgcccatgttcggccagtcggtggtggaggtttacttccctgagaacaacatcccgggcgagagggtggccacggtgctggcgacagacgcagacagcggtaagaacgccgagatcgcctactcgctggactcctctgtgatggggatctttgccatcgatcccgattctggggacatcctggtcaataccgtgctggaccgcgagcagactgacaggtatgagtttaaagttaacgccaaagacaaaggcatccccgtgctgcagggcagcactacggtgattgtgcaggtggctgataaaaatgacaatgaccctaagtttatgcaggacgtcttcaccttttatgtgaaagaaaacttgcagcccaacagccctgtggggatggtcaccgtgatggatgctgacaaggggcggaatgcagagatgagcctgtacatagaggagaacaataacattttttctattgaaaatgacacggggaccatttactccacaatgtcttttgaccgggaacatcagaccacatacactttcagagtcaaggctgtggatgggggagatcctcccagatctgccacagctacagtctcgctttttgtgatggatgaaaatgacaatgctcccacagttacccttcccaaaaacatttcctacactttactgccaccttcgagtaatgtcaggacagtagtagctacagtgttggcaacagacagtgatgatggcatcaatgcagacctgaactacagcattgtgggaggaaatcccttcaagctgtttgaaattgatcccactagtggtgtggtttccttagtgggaaaactcacccaaaagcattatggcttgcacaggttggtggtgcaagtgaatgacagtgggcagccttcccagtccaccacgactctggtgcacgtgtttgtcaatgaaagtgtttctaatgcaactgcgattgactcccagatagctagaagtttgcacatcccactcacccaggatatagctggtgacccaagctatgaaattagcaaacagagactcagtattgtcattggcgtggttgctggcattatgacggtgattctaatcatcttaattgtagtgatggcaaggtactgcaggtccaaaaataaaaatggctatgaagccggcaaaaaagatcacgaagacttttttacaccccaacagcatgacaaatctaaaaagcctaaaaaggacaagaaaaacaaaaaatctaagcagcctctctacagcagcattgtcactgtggaggcttctaagccaaatggacagaggtatgatagtgtcaatgagaagctgtcagacagcccaagcatggggcgatacaggtccgttaatggtgggcccggcagtcctgacctggcaaggcattacaaatctagttccccattgcctactgttcagcttcatccccagtcaccaactgcaggaaaaaaacaccaggccgtacaagatctaccaccagccaacacatttgtgggagcaggagacaacatttcaattggatcagatcactgctctgagtacagctgtcaaaccaataacaagtacagcaaacagatgcgtctacatccatacattactgtgtttggctga

SEQ ID NO: 501 - protein, 1069 aa, Homo sapiens
MLRMRTAGWARGWCLGCCLLLPLSLSLAAAKQLLRYRLAEEGPADVRIGNVASDLGIVTGSGEVTFSLESGSEYLKIDNLTGELSTSERRIDREKLPQCQMIFDENECFLDFEVSVIGPSQSWVDLFEGQVIVLDINDNTPTFPSPVLTLTVEENRPVGTLYLLPTATDRDFGRNGIERYELLQEPGGGGSGGESRRAGAADSAPYPGGGGNGASGGGSGGSKRRLDASEGGGGTNPGGRSSVFELQVADTPDGEKQPQLIVKGALDREQRDSYELTLRVRDGGDPPRSSQAILRVLITDVNDNSPRFEKSVYEADLAENSAPGTPILQLRAADLDVGVNGQIEYVFGAATESVRRLLRLDETSGWLSVLHRIDREEVNQLRFTVMARDRGQPPKTDKATVVLNIKDENDNVPSIEIRKIGRIPLKDGVANVAEDVLVDTPIALVQVSDRDQGENGVVTCTVVGDVPFQLKPASDTEGDQNKKKYFLHTSTPLDYEATREFNVVIVAVDSGSPSLSSNNSLIVKVGDTNDNPPMFGQSVVEVYFPENNIPGERVATVLATDADSGKNAEIAYSLDSSVMGIFAIDPDSGDILVNTVLDREQTDRYEFKVNAKDKGIPVLQGSTTVIVQVADKNDNDPKFMQDVFTFYVKENLQPNSPVGMVTVMDADKGRNAEMSLYIEENNNIFSIENDTGTIYSTMSFDREHQTTYTFRVKAVDGGDPPRSATATVSLFVMDENDNAPTVTLPKNISYTLLPPSSNVRTVVATVLATDSDDGINADLNYSIVGGNPFKLFEIDPTSGVVSLVGKLTQKHYGLHRLVVQVNDSGQPSQSTTTLVHVFVNESVSNATAIDSQIARSLHIPLTQDIAGDPSYEISKQRLSIVIGVVAGIMTVILIILIVVMARYCRSKNKNGYEAGKKDHEDFFTPQQHDKSKKPKKDKKNKKSKQPLYSSIVTVEASKPNGQRYDSVNEKLSDSPSMGRYRSVNGGPGSPDLARHYKSSSPLPTVQLHPQSPTAGKKHQAVQDLPPANTFVGAGDNISIGSDHCSEYSCQTNNKYSKQMRLHPYITVFG

SEQ ID NO: 502 - DNA, 13134 bp, Homo sapiens
  source 1..13134: mol_type = other DNA
atggctcatgcagcctcacaattaaagaaaaacagggatttagaaatcaatgctgaagaagagcctgagaaaaaaaggaaacaccgcaaacggtcccgggatcggaagaaaaagtctgatgccaatgcaagttacttaagagcagctcgagctggacaccttgaaaaggccctcgactacataaaaaatggagttgacatcaacatttgcaatcagaatgggttgaacgctctccaccttgcttccaaagaaggccatgtagaggttgtttctgagctgctgcagagagaagccaatgtggatgcagctacaaagaaaggaaacacagcattgcacatcgcatctttggctgggcaagcagaggtggtaaaagtcttggttacaaatggagccaatgtcaatgcacaatctcagaatggtttcacgccattgtatatggcagcccaggaaaatcacctggaagttgtcaagtttcttcttgacaatggtgcaagccagagcctagccacagaggatggcttcacaccattggcagtggctttgcaacaaggtcacgaccaagtcgtttcgctcctgctagagaatgacaccaaaggaaaagtgcgtctcccagctcttcatatcgcggcccgaaaagacgacacgaaagccgccgccctgctgctgcagaatgacaacaatgcagatgtggaatcaaagagtggcttcactccgctccacatagctgctcactatggaaatatcaatgtagccacgttgctgttaaaccgagcggctgctgtggatttcaccgcaaggaatgacatcactcctttacatgttgcatcaaaaagaggaaatgcaaatatggtaaaactattgctcgatcgaggagctaaaatcgatgccaaaaccagggatggtctgacaccactgcactgtggagcaaggagtggccacgagcaggtggtagaaatgttgcttgatcgagctgcccccattctttcaaaaaccaagaatggattatctccattgcacatggccacacaaggggatcatttaaactgcgtccagcttctcctccagcataatgtacccgtggatgatgtcaccaatgactacctgactgccctacacgtggctgcccactgtggccattacaaagttgccaaggttctcttggataagaaagctaaccccaatgccaaagccctgaatggctttacccctcttcatattgcctgcaagaagaatcgaattaaagtaatggaactccttctgaaacacggtgcatccatccaagctgtaaccgagtcgggccttaccccaatccatgttgctgccttcatggggcatgtaaatattgtatcacaactaatgcatcatggagcctcaccaaacaccaccaatgtgagaggagaaacagcactgcacatggcagctcgctccggccaagctgaagttgtgcggtatctggtacaagacggagctcaggtagaagctaaagctaaggatgaccaaacaccactccacatttcagcccgactggggaaagcagacatagtacaacagctgttgcagcaaggggcatctccaaatgcagccacaacttctgggtacaccccacttcacctttccgcccgagaggggcatgaggatgtggccgcgttccttttggatcatggagcgtctttatctataacaacaaagaaaggatttactcctcttcatgtggcagcaaaatatggaaagcttgaagtcgccaatctcctgctacagaaaagtgcatctccagatgctgctgggaagagcgggctaacaccactgcatgtagctgcacattacgataatcagaaagtggcccttctgcttttggaccaaggagcctcacctcacgcagccgcaaagaatggttatacgccactgcacatcgctgccaaaaagaaccagatggacatagcgacaactctgctggaatatggtgctgatgccaacgcagttacccggcaaggaattgcttccgtccatctcgcagctcaggaagggcacgtggacatggtgtcgctgctcctcggtagaaatgcgaatgtgaacctgagcaataagagcggcctgaccccactccatttggctgctcaagaagatcgagtgaatgtggcagaagtcctcgtaaaccaaggggctcatgtggacgcccagacaaagatgggatacacaccactgcatgtgggctgccactatggaaatatcaagattgttaatttcctgctccagcattctgcaaaagttaatgccaaaacaaagaatgggtatacgccattacatcaagcagcacagcaggggcatacgcatataataaatgtcttacttcagaacaacgcctcccccaatgaactcactgtgaatgggaatactgcccttggcattgcccggcgcctcggctacatctcagtagtggacaccctgaagatagtgaccgaagagaccatgaccacaactactgtcacagagaagcacaaaatgaatgttccagaaacgatgaatgaagttcttgatatgtctgatgatgaagttcgtaaagccaatgcccctgaaatgctcagtgatggcgaatatatctcagatgttgaagaaggtgaagatgcaatgaccggggacacagacaaatatcttgggccacaggaccttaaggaattgggtgatgattccctgcctgcagagggttacatgggctttagtctcggagcgcgttctgccagcctccgctccttcagttcggataggtcttacaccttgaacagaagctcctatgcacgggacagcatgatgattgaagaactccttgtgccatccaaagagcagcatctaacattcacaagggaatttgattcagattctcttagacattacagctgggctgcagacaccttagacaatgtcaatcttgtttcaagccccattcattctgggtttctggttagctttatggtggacgcgagagggggctccatgagaggaagccgtcatcacgggatgagaatcatcattcctccacgcaagtgtacggcccccactcgaatcacctgccgtttggtaaagagacataaactggccaacccaccccccatggtggaaggagagggattagccagtaggctggtagaaatgggtcctgcaggggcacaatttttaggccctgtcatagtggaaatccctcactttgggtccatgagaggaaaagagagagaactcattgttcttcgaagtgaaaatggtgaaacttggaaggagcatcagtttgacagcaaaaatgaagatttaaccgagttacttaatggcatggatgaagaacttgatagcccagaagagttagggaaaaagcgtatctgcaggattatcacgaaagatttcccccagtattttgcagtggtttcccggattaagcaggaaagcaaccagattggtcctgaaggtggaattctgagcagcaccacagtgccccttgttcaagcatctttcccagagggtgccctaactaaaagaattcgagtgggcctccaggcccagcctgttccagatgaaattgtgaaaaagatccttggaaacaaagcaacttttagcccaattgtcactgtggaaccaagaagacggaaattccataaaccaatcacaatgaccattccggtgcccccgccctcaggagaaggtgtatccaatggatacaaaggggacactacacccaatctgcgtcttctctgtagcattacagggggcacttcgcctgctcagtgggaagacatcacaggaacaactcctttgacgtttataaaagattgtgtctcctttacaaccaatgtttcagccagattttggcttgcagactgccatcaagttttagaaactgtggggttagccacgcaactgtacagagaattgatatgtgttccatatatggccaagtttgttgtttttgccaaaatgaatgatcccgtagaatcttccttgcgatgtttctgcatgacagatgacaaagtggacaaaactttagagcaacaagagaattttgaggaagtcgcaagaagcaaagatattgaggttctggaaggaaaacctatttatgttgattgttatggaaatttggccccacttaccaaaggaggacagcaacttgtttttaacttttattctttcaaagaaaatagactgccattttccatcaagattagagacaccagccaagagccctgtggtcgtctgtcttttctgaaagaaccaaagacaacaaaaggactgcctcaaacagcggtttgcaacttaaatatcactctgccagcacataaaaaggagacagagtcagatcaagatgatgagattgagaaaacagatagacgacagagcttcgcatccttagctttacgtaagcgctacagctacttgactgagcctggaatgattgaacggagtacaggagcaacaagatccctccccaccacttactcatacaagccattcttttctacaagaccataccagtcctggacaacagctccgattacagtgcctgggccagccaagtcaggcttcacttccttatcaagttcttcctctaatacgccatcagcttctccgttaaaatcaatatggtctgtttcgacaccttctccaatcaaatccacattaggcgcgtcaactacatcttcagttaaatccattagtgacgtggcatctccaattagatcctttcggacaatgtcttcgccgataaaaactgtggtgtcacaatctccatacaatatccaagtttcctctggtaccctggctagagctccagcagtcacggaagctacgcccttaaaagggctggcatccaattctacgttttcctctcgaacctctccagtgactacagcagggtctcttttggagaggtcatcaattactatgacaccccctgcctcccccaaatcaaacattaatatgtattcctcaagtttgccatttaagtcaattattacatcagcagcaccgctaatatcttcacctttaaagtcagtggtgtctccagttaaatcagcagttgatgtcatttcatcagccaaaattacaatggcatcttctctctcatcacctgtgaagcagatgcctggacatgcagaggtagcattagtcaatggatctatttcccctctaaaatatccatcatcctcaactttaattaatggatgcaaagccactgccacgttacaggaaaaaatttcttctgctacaaactctgtgagctctgtggtcagtgcagccactgacacagttgagaaagtgttttctaccacgactgcaatgccattttccccactcaggtcatatgtttctgcagcaccatcagcttttcagtctctaagaactccttccgcaagtgcactctatacatcccttgggtcgtcaatatctgcaactacctcatctgtaacttcatcaattataacagtgccagtatactctgtagtcaatgttttgccagaaccagcattaaagaaacttccagactctaattcatttacaaaatcagcagcagccttgctgtcacccattaaaacattgactacggagacacatcctcagcctcacttcagtcgaacttcatctccagttaagtcatctttgttccttgcaccctctgcccttaagttgtctacaccatcttctttatcttccagtcaggagatactaaaagatgtagctgaaatgaaagaggacctaatgcggatgaccgcaatactacagacagatgtgcctgaggagaagccattccaacctgaactcccaaaggaagggagaatagatgatgaagaacctttcaaaattgtagagaaagtaaaggaagacttagtgaaagttagtgaaatccttaaaaaggatgtatgtgtagataataaaggatcacccaaatcaccaaagagtgacaaaggacactctcctgaagatgactggatagaatttagttcggaagaaatccgggaagccagacaacaagctgctgcgagccagtctccatctctgccagagagagtgcaagtaaaagcaaaagccgcctccgaaaaggattataacttgaccaaagttattgattacctaacaaatgatattgggagtagttcactgacaaacttaaaatacaagtttgaggatgcaaagaaggatggtgaggagagacagaaaagagttttaaaaccagcaattgctttgcaggaacacaaactcaaaatgcctccagcctccatgaggacttccacctctgagaaagaattgtgtaaaatggctgattccttttttggaacagatactattttagagtctcctgatgacttttctcaacacgaccaagataaaagtcccttgtctgacagtggctttgaaacaagaagtgaaaagacaccttcagccccacaaagcgctgaaagcactggtcctaaaccactttttcatgaagttcccatccctcctgtcattacagaaacaagaactgaagtggttcatgttatcaggagctatgatccctcagctggggatgttccccagacccaaccagaggagcctgtgtcacctaaaccttcacctacttttatggaattggaaccaaagcccaccacctctagtattaaagaaaaggttaaagcatttcaaatgaaagccagtagtgaagaagatgaccacaatcgggttttaagcaaaggcatgcgtgttaaagaagagactcacataaccacaaccaccagaatggtttatcattctccaccaggcggtgaaggtgcatctgaaagaattgaagaaaccatgtcagtccatgacatcatgaaggcctttcagtccgggcgggatccttccaaagaactggcaggtctgtttgaacataagtcggcagtgtctccagatgttcacaagtctgctgctgaaacctcagcccagcatgcagagaaggacaaccaaatgaaacccaaactggagcgtataatagaagtccacatcgaaaaaggtaaccaagctgagcccactgaagtcattattagagaaaccaaaaagcatccagaaaaagaaatgtatgtatatcagaaagacttatcccggggagatattaacctaaaagattttctgccagaaaaacacgatgcttttccttgttcagaggaacagggtcagcaagaagaagaagaacttactgctgaagagtcattgccttcttatctggagtcttccagagtaaacactcctgtgtcccaagaagaagatagccgccctagttctgctcaactcatatctgatgactcttataaaacattgaagcttttgagtcaacactcaatagaataccatgacgatgagttgtcagaactaagaggggagtcttacaggtttgctgagaaaatgcttctgtcagaaaagctagatgtgtctcattctgatactgaggaatcggttacagaccatgcaggaccccctagctcagagttacaggggtctgataagcggtccagagaaaaaatagccactgcccccaaaaaagaaattctctccaaaatctataaagatgtttctgaaaatggtgtaggtaaagtgtctaaagatgagcattttgataaagtgacagtgttgcactattctggcaatgttagtagtccaaaacatgccatgtggatgcgctttactgaggacagattagacagaggtagagagaagttgatatatgaagatagggtggacaggactgtgaaggaggctgaagaaaaactgactgaagtgtcacagttttttcgtgacaaaactgaaaagctaaatgatgaactgcagtccccagagaaaaaggcacgccctaaaaatggcaaagaatattcttctcaaagccctaccagtagcagccctgagaaagtgctactgacagaactgctggcatccaatgatgagtgggttaaggcaagacagcatggccctgatggacaaggcttccccaaggccgaggagaaggcacccagtctgcccagcagcccagagaagatggttctctcccaacagactgaggacagcaagtccacagtggaagccaaaggaagtatttcacagagcaaagcaccagatgggccccagtctggattccagctcaaacaatctaaactcagttccattagattaaaatttgaacaaggcacacacgcaaaaagtaaggacatgtctcaagaagacagaaagtcagatggccagtccagaatcccagttaaaaaaatacaggagagcaagctacccgtctaccaagtttttgctagagaaaaacagcagaaggccatagacctcccagatgaaagtgtatctgtgcaaaaagattttatggtattaaaaaccaaagatgagcatgcccaaagcaacgaaattgttgtaaatgattctggctctgataatgtgaaaaaacagagaactgaaatgtcaagtaaagcaatgcctgactctttttctgagcagcaggctaaagacttggcatgtcatataacctcagatttagcaactaggggaccatgggacaaaaaggtctttagaacatgggagagttcgggagccactaacaataagtctcagaaagaaaaactttcgcatgtacttgttcatgatgtaagagagaatcacattggtcaccctgagagtaaaagtgttgatcaaaagaatgaatttatgtctgtgactgagagagaacgcaaattgttaacaaacggctctctctcagaaattaaagaaatgactgtaaaatctccctccaaaaaagtcttatatagggaatatgttgtgaaagaaggggaccatccaggcggattgcttgatcagccttccaggaggagcgagagctcagcagtgtcacacattcccgtcagagttgctgatgagaggagaatgctgtcttctaatattcccgatggtttttgtgaacagtcggcatttccaaaacatgaactatcacaaaaattgtcccagtcaagcatgagtaaagagacagttgagacacagcactttaattctatagaagatgaaaaagttacctattcagaaatcagcaaagtttccaaacaccagagttatgtaggtttatgcccacctctcgaggaaaccgaaacctcccccaccaaatctcctgattctttagagtttagcccaggaaaggaatctccctctagtgatgtattcgaccacagtcccattgatggattggaaaaactcgcaccactagcccagacagagggagggaaagagataaaaactttacccgtttatgtcagttttgtacaagtggggaagcaatatgaaaaggagatacaacaaggaggtgtaaaaaaaatcataagtcaggaatgtaagacagtacaagaaaccagggggaccttttatacaactagacagcaaaagcaacctccttctccccaaggtagtccagaagatgatactctagagcaagtatcctttctagacagctctgggaaaagccctttaaccccagaaacacccagttcagaggaagtgagttatgaatttacatctaagacacctgactcgctcatagcttatataccaggcaaacccagcccaattcccgaggtttctgaggagtcagaggaggaggaacaggccaagtcaacctcccttaagcagactacagtggaggaaacagcagttgagcgtgaaatgcctaatgacgtgagcaaagactctaaccaaagacccaaaaataacagagttgcctatattgaatttccccctcctccaccactggatgcggaccagattgagtcagataagaagcatcattatctcccagaaaaagaggttgacatgattgaagtcaatctgcaagatgagcatgacaagtaccagctggctgaacctgtcattagagtgcagccaccttcaccagttcctcccggggcagacgtcagtgattcaagcgatgacgaatctatttatcagccagtcccagttaaaaaatataccttcaaattaaaggaagtggacgatgaacaaaaagaaaaacccaaagcttctgctgaaaaggcttccaaccagaaagaactggaaagtaatggatctggaaaagataatgaatttggccttggccttgattcacctcagaatgaaattgcccagaatgggaacaacgaccagtccatcacagagtgttccattgccaccacagcagagttttctcatgacacggatgccacagagatcgactctctggatggctatgacctgcaagatgaagatgatggcttgacagagagtgattctaaactcccaattcaagccatggaaattaagaaagatatctggaacacagagggcattctgaagccagctgaccgctcttttagccaaagtaaacttgaagttatcgaggaggagggaaaggtgggaccagatgaggacaagccaccttctaaaagttcttcatctgaaaagactcctgataagactgatcagaagtcaggggcccagttcttcacactggaaggcagacatcctgacagatcagtgtttcctgatacttacttcagttacaaagtagatgaagaatttgccactccttttaaaacagtagctaccaaaggtctagattttgacccttggtctaataaccgaggggatgatgaagtttttgacagtaaatcacgggaagatgaaactaagccatttgggctggcggtagaagaccgctctccagcaacaacccctgatacaacgccagccagaacgccaactgatgaaagtaccccaactagtgagcctaaccccttcccatttcatgaaggaaaaatgtttgagatgactcgcagtggtgcaattgacatgagcaagagggattttgttgaagagaggctccaatttttccagattggtgagcatacttctgaagggaagtcaggggaccagggggaaggggataaaagtatggtcactgccacaccacagccacagtcaggggacaccactgtagaaaccaatctagagagaaatgtagagacacctacagtggaacctaaccccagcatcccgaccagcggagagtgtcaggaaggcacatccagtagtggctccctggagaaatcagcagcagccactaacacctctaaagttgaccccaagttgcgcacgcctataaaaatgggaatttctgcatccaccatgaccatgaagaaagaaggccctggagaaataacagataagatagaagcggtgatgaccagttgtcagggattagaaaatgaaactataacaatgatttcaaatacagccaatagccagatgggcgttaggccccatgaaaaacatgattttcaaaaagataactttaataacaacaacaatttggattcttccactatacagacagataacattatgagtaatatagttctgacagaacattctgcacccacttgtaccacagagaaagataacccagtgaaagtctcatcaggaaaaaagacaggggtactacaaggacactgtgtaagagataagcagaaagttcttggagaacagcaaaaaacaaaggaattgatagggattaggcaaaaatccaaacttcccataaaggccacttcaccaaaagataccttcccaccgaaccatatgtcaaacactaaagcaagtaaaatgaagcaggttagtcaatccgagaaaaccaaagcccttactacttcttcatgtgtagatgtaaagtccagaattccagtgaaaaacacacacagggataacataattgcagttagaaaagcatgtgccacacaaaagcaagggcagccagagaaaggcaaggccaaacagcttccatccaagttgccagtaaaggtaagatccacctgtgtcactaccaccaccaccactgccaccaccaccaccactaccaccactaccaccaccaccagctgcacagttaaagttaggaaaagtcagctcaaggaagtatgtaaacattccattgaatattttaagggaattagtggtgagaccttaaagcttgtggaccgcctctctgaagaagaaaaaaagatgcagtccgagttgtccgatgaggaagaaagtacctcaagaaacacgtcgttgtccgagacttcccggggtggccagccttcggttacaacgaagtctgctagagataagaaaacagaggcagcacctttaaaatcaaagagtgaaaaggccggcagtgagaaaaggagcagtagaaggactggtccacagagtccatgtgaacggacagatatcaggatggcaatagtagccgatcacctgggacttagttggacagaactggcaagggaactgaatttttcagtggatgaaatcaatcaaatacgtgtggaaaatccaaattctttaatttctcagagcttcatgttattaaaaaaatgggttaccagagacggaaaaaatgccacaactgatgccttaacttcggtcttgacaaaaattaatcgaatagatatagtgacactgctagaaggaccaatatttgattatggaaatatttcaggcaccagaagttttgcagatgagaacaatgttttccatgaccctgttgatggttggcagaatgagacatcaagtggaaacctagagtcctgcgctcaagctcgaagagtaactggtgggttactagatcgactggatgacagccctgaccagtgtagagattccattacctcatatctcaaaggagaagctggcaaatttgaagcaaatggaagccatacagaaatcactccagaagcaaagacaaaatcttactttccagaatcccaaaatgatgtaggaaaacagagtaccaaggaaactctgaaaccaaaaatacatggatctggtcatgttgaagaaccagcatcaccactagcagcatatcagaaatctctagaagaaaccagcaagcttataatagaagagactaaaccctgtgtgcctgtcagtatgaaaaagatgagtaggacttctccagcagatggcaagccaaggcttagcctccatgaagaagaggggtccagtgggtctgagcaaaagcagggagaaggttttaaggtgaaaacgaagaaagaaatccggcatgtggaaaagaagagccactcgtaa

SEQ ID NO: 503 - protein, 4377 aa, Homo sapiens
MAHAASQLKKNRDLEINAEEEPEKKRKHRKRSRDRKKKSDANASYLRAARAGHLEKALDYIKNGVDINICNQNGLNALHLASKEGHVEVVSELLQREANVDAATKKGNTALHIASLAGQAEVVKVLVTNGANVNAQSQNGFTPLYMAAQENHLEVVKFLLDNGASQSLATEDGFTPLAVALQQGHDQVVSLLLENDTKGKVRLPALHIAARKDDTKAAALLLQNDNNADVESKSGFTPLHIAAHYGNINVATLLLNRAAAVDFTARNDITPLHVASKRGNANMVKLLLDRGAKIDAKTRDGLTPLHCGARSGHEQVVEMLLDRAAPILSKTKNGLSPLHMATQGDHLNCVQLLLQHNVPVDDVTNDYLTALHVAAHCGHYKVAKVLLDKKANPNAKALNGFTPLHIACKKNRIKVMELLLKHGASIQAVTESGLTPIHVAAFMGHVNIVSQLMHHGASPNTTNVRGETALHMAARSGQAEVVRYLVQDGAQVEAKAKDDQTPLHISARLGKADIVQQLLQQGASPNAATTSGYTPLHLSAREGHEDVAAFLLDHGASLSITTKKGFTPLHVAAKYGKLEVANLLLQKSASPDAAGKSGLTPLHVAAHYDNQKVALLLLDQGASPHAAAKNGYTPLHIAAKKNQMDIATTLLEYGADANAVTRQGIASVHLAAQEGHVDMVSLLLGRNANVNLSNKSGLTPLHLAAQEDRVNVAEVLVNQGAHVDAQTKMGYTPLHVGCHYGNIKIVNFLLQHSAKVNAKTKNGYTPLHQAAQQGHTHIINVLLQNNASPNELTVNGNTALGIARRLGYISVVDTLKIVTEETMTTTTVTEKHKMNVPETMNEVLDMSDDEVRKANAPEMLSDGEYISDVEEGEDAMTGDTDKYLGPQDLKELGDDSLPAEGYMGFSLGARSASLRSFSSDRSYTLNRSSYARDSMMIEELLVPSKEQHLTFTREFDSDSLRHYSWAADTLDNVNLVSSPIHSGFLVSFMVDARGGSMRGSRHHGMRIIIPPRKCTAPTRITCRLVKRHKLANPPPMVEGEGLASRLVEMGPAGAQFLGPVIVEIPHFGSMRGKERELIVLRSENGETWKEHQFDSKNEDLTELLNGMDEELDSPEELGKKRICRIITKDFPQYFAVVSRIKQESNQIGPEGGILSSTTVPLVQASFPEGALTKRIRVGLQAQPVPDEIVKKILGNKATFSPIVTVEPRRRKFHKPITMTIPVPPPSGEGVSNGYKGDTTPNLRLLCSITGGTSPAQWEDITGTTPLTFIKDCVSFTTNVSARFWLADCHQVLETVGLATQLYRELICVPYMAKFVVFAKMNDPVESSLRCFCMTDDKVDKTLEQQENFEEVARSKDIEVLEGKPIYVDCYGNLAPLTKGGQQLVFNFYSFKENRLPFSIKIRDTSQEPCGRLSFLKEPKTTKGLPQTAVCNLNITLPAHKKETESDQDDEIEKTDRRQSFASLALRKRYSYLTEPGMIERSTGATRSLPTTYSYKPFFSTRPYQSWTTAPITVPGPAKSGFTSLSSSSSNTPSASPLKSIWSVSTPSPIKSTLGASTTSSVKSISDVASPIRSFRTMSSPIKTVVSQSPYNIQVSSGTLARAPAVTEATPLKGLASNSTFSSRTSPVTTAGSLLERSSITMTPPASPKSNINMYSSSLPFKSIITSAAPLISSPLKSVVSPVKSAVDVISSAKITMASSLSSPVKQMPGHAEVALVNGSISPLKYPSSSTLINGCKATATLQEKISSATNSVSSVVSAATDTVEKVFSTTTAMPFSPLRSYVSAAPSAFQSLRTPSASALYTSLGSSISATTSSVTSSIITVPVYSVVNVLPEPALKKLPDSNSFTKSAAALLSPIKTLTTETHPQPHFSRTSSPVKSSLFLAPSALKLSTPSSLSSSQEILKDVAEMKEDLMRMTAILQTDVPEEKPFQPELPKEGRIDDEEPFKIVEKVKEDLVKVSEILKKDVCVDNKGSPKSPKSDKGHSPEDDWIEFSSEEIREARQQAAASQSPSLPERVQVKAKAASEKDYNLTKVIDYLTNDIGSSSLTNLKYKFEDAKKDGEERQKRVLKPAIALQEHKLKMPPASMRTSTSEKELCKMADSFFGTDTILESPDDFSQHDQDKSPLSDSGFETRSEKTPSAPQSAESTGPKPLFHEVPIPPVITETRTEVVHVIRSYDPSAGDVPQTQPEEPVSPKPSPTFMELEPKPTTSSIKEKVKAFQMKASSEEDDHNRVLSKGMRVKEETHITTTTRMVYHSPPGGEGASERIEETMSVHDIMKAFQSGRDPSKELAGLFEHKSAVSPDVHKSAAETSAQHAEKDNQMKPKLERIIEVHIEKGNQAEPTEVIIRETKKHPEKEMYVYQKDLSRGDINLKDFLPEKHDAFPCSEEQGQQEEEELTAEESLPSYLESSRVNTPVSQEEDSRPSSAQLISDDSYKTLKLLSQHSIEYHDDELSELRGESYRFAEKMLLSEKLDVSHSDTEESVTDHAGPPSSELQGSDKRSREKIATAPKKEILSKIYKDVSENGVGKVSKDEHFDKVTVLHYSGNVSSPKHAMWMRFTEDRLDRGREKLIYEDRVDRTVKEAEEKLTEVSQFFRDKTEKLNDELQSPEKKARPKNGKEYSSQSPTSSSPEKVLLTELLASNDEWVKARQHGPDGQGFPKAEEKAPSLPSSPEKMVLSQQTEDSKSTVEAKGSISQSKAPDGPQSGFQLKQSKLSSIRLKFEQGTHAKSKDMSQEDRKSDGQSRIPVKKIQESKLPVYQVFAREKQQKAIDLPDESVSVQKDFMVLKTKDEHAQSNEIVVNDSGSDNVKKQRTEMSSKAMPDSFSEQQAKDLACHITSDLATRGPWDKKVFRTWESSGATNNKSQKEKLSHVLVHDVRENHIGHPESKSVDQKNEFMSVTERERKLLTNGSLSEIKEMTVKSPSKKVLYREYVVKEGDHPGGLLDQPSRRSESSAVSHIPVRVADERRMLSSNIPDGFCEQSAFPKHELSQKLSQSSMSKETVETQHFNSIEDEKVTYSEISKVSKHQSYVGLCPPLEETETSPTKSPDSLEFSPGKESPSSDVFDHSPIDGLEKLAPLAQTEGGKEIKTLPVYVSFVQVGKQYEKEIQQGGVKKIISQECKTVQETRGTFYTTRQQKQPPSPQGSPEDDTLEQVSFLDSSGKSPLTPETPSSEEVSYEFTSKTPDSLIAYIPGKPSPIPEVSEESEEEEQAKSTSLKQTTVEETAVEREMPNDVSKDSNQRPKNNRVAYIEFPPPPPLDADQIESDKKHHYLPEKEVDMIEVNLQDEHDKYQLAEPVIRVQPPSPVPPGADVSDSSDDESIYQPVPVKKYTFKLKEVDDEQKEKPKASAEKASNQKELESNGSGKDNEFGLGLDSPQNEIAQNGNNDQSITECSIATTAEFSHDTDATEIDSLDGYDLQDEDDGLTESDSKLPIQAMEIKKDIWNTEGILKPADRSFSQSKLEVIEEEGKVGPDEDKPPSKSSSSEKTPDKTDQKSGAQFFTLEGRHPDRSVFPDTYFSYKVDEEFATPFKTVATKGLDFDPWSNNRGDDEVFDSKSREDETKPFGLAVEDRSPATTPDTTPARTPTDESTPTSEPNPFPFHEGKMFEMTRSGAIDMSKRDFVEERLQFFQIGEHTSEGKSGDQGEGDKSMVTATPQPQSGDTTVETNLERNVETPTVEPNPSIPTSGECQEGTSSSGSLEKSAAATNTSKVDPKLRTPIKMGISASTMTMKKEGPGEITDKIEAVMTSCQGLENETITMISNTANSQMGVRPHEKHDFQKDNFNNNNNLDSSTIQTDNIMSNIVLTEHSAPTCTTEKDNPVKVSSGKKTGVLQGHCVRDKQKVLGEQQKTKELIGIRQKSKLPIKATSPKDTFPPNHMSNTKASKMKQVSQSEKTKALTTSSCVDVKSRIPVKNTHRDNIIAVRKACATQKQGQPEKGKAKQLPSKLPVKVRSTCVTTTTTTATTTTTTTTTTTTSCTVKVRKSQLKEVCKHSIEYFKGISGETLKLVDRLSEEEKKMQSELSDEEESTSRNTSLSETSRGGQPSVTTKSARDKKTEAAPLKSKSEKAGSEKRSSRRTGPQSPCERTDIRMAIVADHLGLSWTELARELNFSVDEINQIRVENPNSLISQSFMLLKKWVTRDGKNATTDALTSVLTKINRIDIVTLLEGPIFDYGNISGTRSFADENNVFHDPVDGWQNETSSGNLESCAQARRVTGGLLDRLDDSPDQCRDSITSYLKGEAGKFEANGSHTEITPEAKTKSYFPESQNDVGKQSTKETLKPKIHGSGHVEEPASPLAAYQKSLEETSKLIIEETKPCVPVSMKKMSRTSPADGKPRLSLHEEEGSSGSEQKQGEGFKVKTKKEIRHVEKKSHS

SEQ ID NO: 504 - DNA, 1398 bp, Homo sapiens
  source 1..1398: mol_type = other DNA
atggcctcaaccaccagcaccaagaagatgatggaggaagccacctgctccatctgcctgagcctgatgacgaacccagtaagcatcaactgtggacacagctactgccacttgtgtataacagacttctttaaaaacccaagccaaaagcaactgaggcaggagacattctgctgtccccagtgtcgggctccatttcatatggatagcctccgacccaacaagcagctgggaagcctcattgaagccctcaaagagacggatcaagaaatgtcatgtgaggaacacggagagcagttccacctgttctgcgaagacgaggggcagctcatctgctggcgctgtgagcgggcaccacagcacaaagggcacaccacagctcttgttgaagacgtatgccagggctacaaggaaaagctccagaaagctgtgacaaaactgaagcaacttgaagacagatgtacggagcagaagctgtccacagcaatgcgaataactaaatggaaagagaaggtacagattcagagacaaaaaatccggtctgactttaagaatctccagtgtttcctacatgaggaagagaagtcttatctctggaggctggagaaagaagaacaacagactctgagtagactgagggactatgaggctggtctggggctgaagagcaatgaactcaagagccacatcctggaactggaggaaaaatgtcagggctcagcccagaaattgctgcagaatgtgaatgacactttgagcaggagttgggctgtgaagctggaaacatcagaggctgtctccttggaacttcatactatgtgcaatgtttccaagctttacttcgatgtgaagaaaatgttaaggagtcatcaagttagtgtgactctggatccagatacagctcatcacgaactaattctctctgaggatcggagacaagtgactcgtggatacacccaggagaatcaggacacatcttccaggagatttactgccttcccctgtgtcttgggttgtgaaggcttcacctcaggaagacgttactttgaagtggatgttggcgaaggaaccggatgggatttaggagtttgtatggaaaatgtgcagaggggcactggcatgaagcaagagcctcagtctggattctggaccctcaggctgtgcaaaaagaaaggctatgtagcacttacttctcccccaacttcccttcatctgcatgagcagcccctgcttgtgggaatttttctggactatgaggccggagttgtatccttttataacgggaatactggctgccacatctttactttcccgaaggcttccttctctgatactctccggccctatttccaggtttatcaatattctcctttgtttctgcctcccccaggtgactaa

SEQ ID NO: 505 - protein, 465 aa, Homo sapiens
MASTTSTKKMMEEATCSICLSLMTNPVSINCGHSYCHLCITDFFKNPSQKQLRQETFCCPQCRAPFHMDSLRPNKQLGSLIEALKETDQEMSCEEHGEQFHLFCEDEGQLICWRCERAPQHKGHTTALVEDVCQGYKEKLQKAVTKLKQLEDRCTEQKLSTAMRITKWKEKVQIQRQKIRSDFKNLQCFLHEEEKSYLWRLEKEEQQTLSRLRDYEAGLGLKSNELKSHILELEEKCQGSAQKLLQNVNDTLSRSWAVKLETSEAVSLELHTMCNVSKLYFDVKKMLRSHQVSVTLDPDTAHHELILSEDRRQVTRGYTQENQDTSSRRFTAFPCVLGCEGFTSGRRYFEVDVGEGTGWDLGVCMENVQRGTGMKQEPQSGFWTLRLCKKKGYVALTSPPTSLHLHEQPLLVGIFLDYEAGVVSFYNGNTGCHIFTFPKASFSDTLRPYFQVYQYSPLFLPPPGD

SEQ ID NO: 506 - DNA, 1296 bp, Homo sapiens
  source 1..1296: mol_type = other DNA
ctctaccggcgggatttgatggcgtgatgtctcacagaaagttctccgctcccagacatgggtccctcggcttcctgcctcggaagcgcagcagcaggcatcgtgggaaggtgaagagcttccctaaggatgacccgtccaagccggtccacctcacagccttcctgggatacaaggctggcatgactcacatcgtgcgggaagtcgacaggccgggatccaaggtgaacaagaaggaggtggtggaggctgtgaccattgtagagacaccacccatggtggttgtgggcattgtgggctacgtggaaacccctcgaggcctccggaccttcaagactgtctttgctgagcacatcagtgatgaatgcaagaggcgtttctataagaattggcataaatctaagaagaaggcctttaccaagtactgcaagaaatggcaggatgaggatggcaagaagcagctggagaaggacttcagcagcatgaagaagtactgccaagtcatccgtgtcattgcccacacccagatgcgcctgcttcctctgcgccagaagaaggcccacctgatggagatccaggtgaacggaggcactgtggccgagaagctggactgggcccgcgagaggcttgagcagcaggtacctgtgaaccaagtgtttgggcaggatgagatgatcgacgtcatcggggtgaccaagggcaaaggctacaaaggggtcaccagtcgttggcacaccaagaagctgccccgcaagacccaccgaggcctgcgcaaggtggcctgtattggggcatggcatcctgctcgtgtagccttctctgtggcacgcgctgggcagaaaggctaccatcaccgcactgagatcaacaagaagatttataagattggccagggctaccttatcaaggacggcaagctgatcaagaacaatgcctccactgactatgacctatctgacaagagcatcaaccctctgggtggctttgtccactatggtgaagtgaccaatgactttgtcatgctgaaaggctgtgtggtgggaaccaagaagcgggtgctcaccctccgcaagtccttgctggtgcagacgaagcggcgggctctggagaagattgaccttaagttcattgacaccacctccaagtttggccatggccgcttccagaccatggaggagaagaaagcattcatgggaccactgaagaaagaccgaattgcaaaggaagaaggagcttaatgccaggaacagattttgcagttggtggggtctcaataaaagttattttccactgaca

SEQ ID NO: 507-10208 - skipped (9702 entries)

SEQ ID NO: 10209 - protein, 8 aa, Homo sapiens
GFTFSTYG

SEQ ID NO: 10210 - protein, 8 aa, Homo sapiens
ISGTGRTT

SEQ ID NO: 10211 - protein, 14 aa, Homo sapiens
TKERGDYYYGVFDY

SEQ ID NO: 10212 - protein, 6 aa, Homo sapiens
QTISSW

SEQ ID NO: 10213 - skipped

SEQ ID NO: 10214 - protein, 8 aa, Homo sapiens
QQYHRSWT

SEQ ID NO: 10215 - protein, 121 aa, Homo sapiens
EVQLLESGGGLVQPGKSLRLSCAVSGFTFSTYGMNWVRQAPGKGLEWVSSISGTGRTTYHADSVQGRFTVSRDNSKNILYLQMNSLRADDTAVYFCTKERGDYYYGVFDYWGQGTLVTVSS

SEQ ID NO: 10216 - protein, 106 aa, Homo sapiens
DIQMTQSPSTLSASVGDRVTITCRASQTISSWLAWYQQTPEKAPKLLIYAASNLQSGVPSRFSGSGSGTEFTLTISSLQPDDFATYYCQQYHRSWTFGQGTKVEIT

SEQ ID NO: 10217 - protein, 8 aa, Homo sapiens
GFTFSSYW

SEQ ID NO: 10218 - protein, 8 aa, Homo sapiens
IKEDGSEK

SEQ ID NO: 10219 - protein, 15 aa, Homo sapiens
AREDYDSYYKYGMDV

SEQ ID NO: 10220 - protein, 12 aa, Homo sapiens
QSILYSSNNKNY

SEQ ID NO: 10221 - skipped

SEQ ID NO: 10222 - protein, 9 aa, Homo sapiens
QQYYSTPFT

SEQ ID NO: 10223 - protein, 122 aa, Homo sapiens
EVQLVESGGGLVQPGGSLRLSCAVSGFTFSSYWMSWVRQAPGKGLEWVANIKEDGSEKNYVDSVKGRFTLSSDNAKNSLYLQMNSLRAEDTAVYYCAREDYDSYYKYGMDVWGQGTAVIVSS

SEQ ID NO: 10224 - protein, 113 aa, Homo sapiens
DIVMTQSPDSLAVSLGERATINCKSSQSILYSSNNKNYLAWYQQKPGQPPKLLIYWASTRESGVPDRFSGSGSGTDFTLTISSLQAEDVSVYYCQQYYSTPFTFGPGTKVDIK

SEQ ID NO: 10225 - protein, 8 aa, Homo sapiens
GGSFTGFY

SEQ ID NO: 10226 - protein, 7 aa, Homo sapiens
INHRGNT

SEQ ID NO: 10227 - protein, 13 aa, Homo sapiens
ASPFYDFWSGSDY

SEQ ID NO: 10228 - protein, 11 aa, Homo sapiens
QSLVHSDGNTY

SEQ ID NO: 10229 - skipped

SEQ ID NO: 10230 - protein, 9 aa, Homo sapiens
MQATQFPLT

SEQ ID NO: 10231 - protein, 119 aa, Homo sapiens
QVQLQQWGAGLLKPSETLSLTCAVYGGSFTGFYWSWIRQPPGKGLEWIGEINHRGNTNYNPSLKSRVTMSVDTSKNQFSLNMISVTAADTAMYFCASPFYDFWSGSDYWGQGTLVTVSS

SEQ ID NO: 10232 - protein, 112 aa, Homo sapiens
DIMLTQTPLTSPVTLGQPASISCKSSQSLVHSDGNTYLSWLQQRPGQPPRLLFYKISNRFSGVPDRFSGSGAGTDFTLKISRVEAEDVGVYYCMQATQFPLTFGGGTKVEIK

SEQ ID NO: 10233 - protein, 10 aa, Homo sapiens
  MOD_RES 3: note = Pro, Ser, Asp, Gln or Asn
  MOD_RES 5: note = Thr or Arg
  MOD_RES 6: note = Asn, Thr, Tyr or His
GYXFXXYGIS

SEQ ID NO: 10234 - protein, 17 aa, Homo sapiens
  MOD_RES 4: note = Thr, Pro, Ser or Ala
  MOD_RES 8: note = Asn, Gly, Val, Lys or Ala
  MOD_RES 9: note = Thr or Lys
  MOD_RES 10: note = His or Asn
  MOD_RES 13: note = Gln or Arg
  MOD_RES 14: note = Lys or Met
  MOD_RES 15: note = Leu or His
WISXYNGXXXYAXXXQG

SEQ ID NO: 10235 - protein, 15 aa, Homo sapiens
  MOD_RES 8: note = Ser or Ala
  MOD_RES 9: note = Tyr or Pro
  MOD_RES 15: note = Val, Ala or Gly
ENYYGSGXXRGGMDX

SEQ ID NO: 10236 - protein, 10 aa, Homo sapiens
GYDFTYYGIS

SEQ ID NO: 10237 - protein, 17 aa, Homo sapiens
WISTYNGNTHYARMLQG

SEQ ID NO: 10238 - protein, 15 aa, Homo sapiens
ENYYGSGAYRGGMDV

SEQ ID NO: 10239 - protein, 11 aa, Homo sapiens
RASQSVSSYLA

SEQ ID NO: 10240 - protein, 7 aa, Homo sapiens
DASNRAT

SEQ ID NO: 10241 - protein, 9 aa, Homo sapiens
QQRSNWPWT

SEQ ID NO: 10242 - protein, 124 aa, Homo sapiens
QVQLVQSGAEVKKPGASVKVSCKASGYDFTYYGISWVRQAPGQGLEWMGWISTYNGNTHYARMLQGRVTMTTDTSTRTAYMELRSLRSDDTAVYYCARENYYGSGAYRGGMDVWGQGTTVTVSS

SEQ ID NO: 10243 - protein, 107 aa, Homo sapiens
EIVLTQSPATLSLSPGERATLSCRASQSVSSYLAWYQQKPGQAPRLLIYDASNRATGIPARFSGSGSGTDFTLTISSLEPEDFAVYYCQQRSNWPWTFGQGTKVEIK

SEQ ID NO: 10244 - protein, 453 aa, Homo sapiens
QVQLVQSGAEVKKPGASVKVSCKASGYDFTYYGISWVRQAPGQGLEWMGWISTYNGNTHYARMLQGRVTMTTDTSTRTAYMELRSLRSDDTAVYYCARENYYGSGAYRGGMDVWGQGTTVTVSSASTKGPSVFPLAPSSKSTSGGTAALGCLVKDYFPEPVTVSWNSGALTSGVHTFPAVLQSSGLYSLSSVVTVPSSSLGTQTYICNVNHKPSNTKVDKKVEPKSCDKTHTCPPCPAPEAAGAPSVFLFPPKPKDTLMISRTPEVTCVVVDVSHEDPEVKFNWYVDGVEVHNAKTKPREEQYNSTYRVVSVLTVLHQDWLNGKEYKCKVSNKALPAPIEKTISKAKGQPREPQVYTLPPSREEMTKNQVSLTCLVKGFYPSDIAVEWESNGQPENNYKTTPPVLDSDGSFFLYSKLTVDKSRWQQGNVFSCSVMHEALHNHYTQKSLSLSPG

SEQ ID NO: 10245 - protein, 214 aa, Homo sapiens
EIVLTQSPATLSLSPGERATLSCRASQSVSSYLAWYQQKPGQAPRLLIYDASNRATGIPARFSGSGSGTDFTLTISSLEPEDFAVYYCQQRSNWPWTFGQGTKVEIKRTVAAPSVFIFPPSDEQLKSGTASVVCLLNNFYPREAKVQWKVDNALQSGNSQESVTEQDSKDSTYSLSSTLTLSKADYEKHKVYACEVTHQGLSSPVTKSFNRGEC

SEQ ID NO: 10246 - protein, 7 aa, Homo sapiens
SRSYYWG

SEQ ID NO: 10247 - protein, 16 aa, Homo sapiens
SIYYNGRTYYNPSLKS

SEQ ID NO: 10248 - protein, 11 aa, Homo sapiens
EDYGDYGAFDI

SEQ ID NO: 10249 - protein, 11 aa, Homo sapiens
RASQGISSALA

SEQ ID NO: 10250 - protein, 7 aa, Homo sapiens
DASSLES

SEQ ID NO: 10251 - protein, 9 aa, Homo sapiens
QQFNSYPLT

SEQ ID NO: 10252 - protein, 121 aa, Homo sapiens
QLQLQESGPGLVKPSETLSLTCTVSGGSISSRSYYWGWIRQPPGKGLEWIGSIYYNGRTYYNPSLKSRVTISVDTSKNQFSLKLSSVTAADTAVYYCAREDYGDYGAFDIWGQGTMVTVSS

SEQ ID NO: 10253 - protein, 107 aa, Homo sapiens [sequence omitted]

SEQ ID NO: 10254 - protein, 7 aa, Homo sapiens
TSNMGVV

SEQ ID NO: 10255 - protein, 16 aa, Homo sapiens
HILWDDREYSNPALKS

SEQ ID NO: 10256 - protein, 14 aa, Homo sapiens
MSRNYYGSSYVMDY

SEQ ID NO: 10257 - protein, 10 aa, Homo sapiens
SASSSVNYMH

SEQ ID NO: 10258 - protein, 7 aa, Homo sapiens
STSNLAS

SEQ ID NO: 10259 - protein, 8 aa, Homo sapiens
HQWNNYGT

SEQ ID NO: 10260 - protein, 124 aa, Homo sapiens
QVTLKESGPALVKPTQTLTLTCTFSGFSLSTSNMGVVWIRQPPGKALEWLAHILWDDREYSNPALKSRLTISKDTSKNQVVLTMTNMDPVDTATYYCARMSRNYYGSSYVMDYWGQGTLVTVSS

SEQ ID NO: 10261 - protein, 106 aa, Homo sapiens
DIQLTQSPSFLSASVGDRVTITCSASSSVNYMHWYQQKPGKAPKLLIYSTSNLASGVPSRFSGSGSGTEFTLTISSLQPEDFATYYCHQWNNYGTFGQGTKVEIKR

SEQ ID NO: 10262 - protein, 5 aa, Homo sapiens
LYGMN

SEQ ID NO: 10263 - protein, 5 aa, Homo sapiens
NYGMN

SEQ ID NO: 10264 - protein, 17 aa, Homo sapiens
WINTYTGEPTYADDFKG

SEQ ID NO: 10265 - protein, 10 aa, Homo sapiens
DTAMDYAMAY

SEQ ID NO: 10266 - protein, 13 aa, Homo sapiens
DYGKYGDYYAMDY

SEQ ID NO: 10267 - protein, 16 aa, Homo sapiens
KSSQNIVHSDGNTYLE

SEQ ID NO: 10268 - protein, 16 aa, Homo sapiens
RSSQSIVHSNGNTYLD

SEQ ID NO: 10269 - protein, 7 aa, Homo sapiens
KVSNRFS

SEQ ID NO: 10270 - protein, 9 aa, Homo sapiens
FQGSHVPLT

SEQ ID NO: 10271 - protein, 119 aa, Homo sapiens
QVQLVQSGSELKKPGASVKVSCKASGYTFTLYGMNWVRQAPGQGLEWMGWINTYTGEPTYADDFKGRFVFSLDTSVSTAYLQISSLKAEDTAVYYCARDTAMDYAMAYWGQGTLVTVSS

SEQ ID NO: 10272 - protein, 119 aa, Homo sapiens
QVQLVQSGSELKKPGASVKVSCKASGYTFTLYGMNWVKQAPGKGLKWMGWINTYTGEPTYADDFKGRFVFSLDTSVSTAYLQISSLKAEDTAVYFCARDTAMDYAMAYWGQGTLVTVSS

SEQ ID NO: 10273 - protein, 122 aa, Homo sapiens
QVQLVQSGSELKKPGASVKVSCKASGYTFTNYGMNWVRQAPGQGLEWMGWINTYTGEPTYADDFKGRFVFSLDTSVSTAYLQISSLKAEDTAVYYCARDYGKYGDYYAMDYWGQGTLVTVSS

SEQ ID NO: 10274 - protein, 122 aa, Homo sapiens
QVQLVQSGSELKKPGASVKVSCKASGYTFTNYGMNWVRQAPGKGLKWMGWINTYTGEPTYADDFKGRFVFSLDTSVSTAYLQISSLKAEDTAVYFCARDYGKYGDYYAMDYWGQGTLVTVSS

SEQ ID NO: 10275 - protein, 113 aa, Homo sapiens
DVVMTQSPLSLPVTLGQPASISCKSSQNIVHSDGNTYLEWFQQRPGQSPRRLIYKVSNRFSGVPDRFSGSGSGTDFTLKISRVEAEDVGVYYCFQGSHVPLTFGGGTKVEIKR

SEQ ID NO: 10276 - protein, 113 aa, Homo sapiens
DVVMTQSPLSLPVTLGQPASISCKSSQNIVHSDGNTYLEWFQQRPGQSPRRLIYKVSNRFSGVPDRFSGSGSGTDFTLKISRVEAEDVGVYYCFQGSHVPLTFGQGTKVEIKR

SEQ ID NO: 10277 - protein, 113 aa, Homo sapiens
DVVMTQTPLSLPVTPGEPASISCKSSQNIVHSDGNTYLEWYLQKPGQSPQLLIYKVSNRFSGVPDRFSGSGSGTDFTLKISRVEAEDLGVYYCFQGSHVPLTFGGGTKVEIKR

SEQ ID NO: 10278 - protein, 113 aa, Homo sapiens
DVVMTQTPLSLPVSLGDQASISCKSSQNIVHSDGNTYLEWYLQKPGQSPKVLIYKVSNRFSGVPDRFSGSGSGTDFTLKISRVEAEDLGVYYCFQGSHVPLTFGGGTKVEIKR

SEQ ID NO: 10279 - protein, 113 aa, Homo sapiens
DVVMTQSPLSLPVTLGQPASISCRSSQSIVHSNGNTYLDWFQQRPGQSPRRLIYKVSNRFSGVPDRFSGSGSGTDFTLKISRVEAEDVGVYYCFQGSHVPLTFGGGTKVEIKR

SEQ ID NO: 10280 - protein, 113 aa, Homo sapiens
DVVMTQSPLSLPVTLGQPASISCRSSQSIVHSNGNTYLDWFQQRPGQSPRRLIYKVSNRFSGVPDRFSGSGSGTDFTLKISRVEAEDVGVYYCFQGSHVPLTFGQGTKVEIKR

SEQ ID NO: 10281 - protein, 113 aa, Homo sapiens
DVVMTQTPLSLPVTPGEPASISCRSSQSIVHSNGNTYLDWYLQKPGQSPQLLIYKVSNRFSGVPDRFSGSGSGTDFTLKISRVEAEDLGVYYCFQGSHVPLTFGGGTKVEIKR

SEQ ID NO: 10282 - protein, 113 aa, Homo sapiens
DVVMTQTPLSLPVSLGDQASISCRSSQSIVHSNGNTYLDWYLQKPGQSPKVLIYKVSNRFSGVPDRFSGSGSGTDFTLKINRVEAEDLGVYFCFQGSHVPLTFGGGTKLEIKR

SEQ ID NO: 10283 - protein, 10 aa, Homo sapiens
GYTFTSSWMH

SEQ ID NO: 10284 - protein, 8 aa, Homo sapiens
IHPNSGGT

SEQ ID NO: 10285 - protein, 14 aa, Homo sapiens
ARGDYYGYVSWFAY

SEQ ID NO: 10286 - protein, 6 aa, Homo sapiens
QNINVL

SEQ ID NO: 10287 - skipped

SEQ ID NO: 10288 - protein, 9 aa, Homo sapiens
QQGQSYPYT

SEQ ID NO: 10289 - protein, 119 aa, Homo sapiens
QVQLQQPGSVLVRPGASVKVSCKASGYTFTSSWMHWAKQRPGQGLEWIGEIHPNSGGTNYNEKFKGKATVDTSSSTAYVDLSSLTSEDSAVYYCARGDYYGYVSWFAYWGQGTLVTVSS

SEQ ID NO: 10290 - protein, 121 aa, Homo sapiens
QVQLVQSGAEVKKPGASVKVSCKASGYTFTSSWMHWARQAPGQGLEWIGEIHPNSGGTNYAQKFQGRATLTVDTSSSTAYMELSRLRSDDTAVYYCARGDYYGYVSWFAYWGQGTLVTVSS

SEQ ID NO: 10291 - protein, 121 aa, Homo sapiens
QVQLVQSGAEVKKPGASVKVSCKASGYTFTSSWMHWARQAPGQGLEWIGEIHPNSGGTNYAQKFQGRATMTVDTSISTAYMELSRLRSDDTAVYYCARGDYYGYVSWFAYWGQGTLVTVSS

SEQ ID NO: 10292 - protein, 121 aa, Homo sapiens
QVQLVQSGAEVKKPGASVKVSCKASGYTFTSSWMHWARQAPGQGLEWIGEIHPNSGGTNYAQKFQGRVTMTVDTSISTAYMELSRLRSDDTAVYYCARGDYYGYVSWFAYWGQGTLVTVSS

SEQ ID NO: 10293 - protein, 121 aa, Homo sapiens
QVQLVQSGAEVKKPGASVKVSCKASGYTFTSSWMHWARQAPGQGLEWMGEIHPNSGGTNYAQKFQGRVTMTVDTSISTAYMELSRLRSDDTAVYYCARGDYYGYVSWFAYWGQGTLVTVSS

SEQ ID NO: 10294 - protein, 107 aa, Homo sapiens
DIQMNQSPSSLSASLGDTITITCHASQNINVLLSWYQQKPGNIPKLLIYKASNLHTGVPSRFSGSGSGTGFTFTISSLQPEDIATYYCQQGQSYPYTFGGGTKLEIK

SEQ ID NO: 10295 - protein, 107 aa, Homo sapiens
DIQMTQSPSSLSASVGDRVTITCQASQDISNYLNWYQQKPGKAPKLLIYDASNLETGVPSRFSGSGSGTDFTFTISSLQPEDIATYYCQQYDNLPYTFGQGTKLEIK

SEQ ID NO: 10296 - protein, 107 aa, Homo sapiens
DIQMTQSPSSLSASVGDRVTITCQASQNINVLLNWYQQKPGKAPKLLIYKASNLHTGVPSRFSGSGSGTDFTFTISSLQPEDIATYYCQQGQSYPYTFGQGTKLEIK

SEQ ID NO: 10297 - protein, 107 aa, Homo sapiens
DIQMNQSPSSLSASVGDRVTITCQASQNINVLLSWYQQKPGKAPKLLIYKASNLHTGVPSRFSGSGSGTDFTFTISSLQPEDIATYYCQQGQSYPYTFGQGTKLEIK

SEQ ID NO: 10298 - protein, 10 aa, Homo sapiens
GYTFTSYDIN

SEQ ID NO: 10299 - protein, 10 aa, Homo sapiens
  MOD_RES 8: note = Asn or Tyr
WLNPNSGXTG

SEQ ID NO: 10300 - protein, 10 aa, Homo sapiens
EVPETAAFEY

SEQ ID NO: 10301 - protein, 14 aa, Homo sapiens
  MOD_RES 10: note = Gly or Ala
  MOD_RES 11: note = Leu, Ser or Gln
  MOD_RES 14: note = His or Leu
TSSSSDIGAXXGVX

SEQ ID NO: 10302 - protein, 7 aa, Homo sapiens
GYYNRPS

SEQ ID NO: 10303 - protein, 10 aa, Homo sapiens
  MOD_RES 3: note = Tyr, Trp or Phe
QSXDGTLSAL

SEQ ID NO: 10304 - protein, 119 aa, Homo sapiens
QVQLVQSGAEVKKPGASVKVSCKASGYTFTSYDINWVRQAPGQGLEWMGWLNPNSGNTGYAQKFQGRVTMTADRSTSTAYMELSSLRSEDTAVYYCAREVPETAAFEYWGQGTLVTVSS

SEQ ID NO: 10305 - protein, 111 aa, Homo sapiens
  MOD_RES 32..33: note = Any amino acid
  MOD_RES 36: note = Any amino acid
  MOD_RES 93: note = Any amino acid
QSVLTQPPSVSGAPGQRVTISCTSSSSDIGAXXGVXWYQQLPGTAPKLLIEGYYNRPSGVPDRFSGSKSGTSASLTITGLLPEDEGDYYCQSXDGTLSALFGGGTKLTVLG

SEQ ID NO: 10306 - protein, 119 aa, Homo sapiens; identical to SEQ ID NO: 10304

SEQ ID NO: 10307 - protein, 111 aa, Homo sapiens
QSVLTQPPSVSGAPGQRVTISCTSSSSDIGAGLGVHWYQQLPGTAPKLLIEGYYNRPSGVPDRFSGSKSGTSASLTITGLLPEDEGDYYCQSWDGTLSALFGGGTKLTVLG

SEQ ID NO: 10308 - protein, 119 aa, Homo sapiens
QVQLVQSGAEVKKPGASVKVSCKASGYTFTSYDINWVRQAPGQGLEWMGWLNPNSGYTGYAQKFQGRVTMTADRSTSTAYMELSSLRSEDTAVYYCAREVPETAAFEYWGQGTLVTVSS

SEQ ID NO: 10309 - protein, 111 aa, Homo sapiens
QSVLTQPPSVSGAPGQRVTISCTSSSSDIGAGLGVHWYQQLPGTAPKLLIEGYYNRPSGVPDRFSGSKSGTSASLTITGLLPEDEGDYYCQSYDGTLSALFGGGTKLTVLG

SEQ ID NO: 10310 - protein, 119 aa, Homo sapiens; identical to SEQ ID NO: 10304

SEQ ID NO: 10311 - protein, 111 aa, Homo sapiens
QSVLTQPPSVSGAPGQRVTISCTSSSSDIGAALGVHWYQQLPGTAPKLLIEGYYNRPSGVPDRFSGSKSGTSASLTITGLLPEDEGDYYCQSWDGTLSALFGGGTKLTVLG

SEQ ID NO: 10312 - protein, 119 aa, Homo sapiens; identical to SEQ ID NO: 10304

SEQ ID NO: 10313 - protein, 111 aa, Homo sapiens
QSVLTQPPSVSGAPGQRVTISCTSSSSDIGAGSGVHWYQQLPGTAPKLLIEGYYNRPSGVPDRFSGSKSGTSASLTITGLLPEDEGDYYCQSWDGTLSALFGGGTKLTVLG

SEQ ID NO: 10314 - protein, 119 aa, Homo sapiens; identical to SEQ ID NO: 10304

SEQ ID NO: 10315 - protein, 111 aa, Homo sapiens
QSVLTQPPSVSGAPGQRVTISCTSSSSDIGAGQGVHWYQQLPGTAPKLLIEGYYNRPSGVPDRFSGSKSGTSASLTITGLLPEDEGDYYCQSWDGTLSALFGGGTKLTVLG

SEQ ID NO: 10316 - protein, 119 aa, Homo sapiens; identical to SEQ ID NO: 10304

SEQ ID NO: 10317 - protein, 111 aa, Homo sapiens
QSVLTQPPSVSGAPGQRVTISCTSSSSDIGAGLGVLWYQQLPGTAPKLLIEGYYNRPSGVPDRFSGSKSGTSASLTITGLLPEDEGDYYCQSWDGTLSALFGGGTKLTVLG

SEQ ID NO: 10318 - protein, 119 aa, Homo sapiens; identical to SEQ ID NO: 10308

SEQ ID NO: 10319 - protein, 111 aa, Homo sapiens; identical to SEQ ID NO: 10307

SEQ ID NO: 10320 - protein, 119 aa, Homo sapiens; identical to SEQ ID NO: 10308

SEQ ID NO: 10321 - protein, 111 aa, Homo sapiens; identical to SEQ ID NO: 10313

SEQ ID NO: 10322 - protein, 119 aa, Homo sapiens; identical to SEQ ID NO: 10308

SEQ ID NO: 10323 - protein, 111 aa, Homo sapiens; identical to SEQ ID NO: 10315

SEQ ID NO: 10324 - protein, 119 aa, Homo sapiens; identical to SEQ ID NO: 10308

SEQ ID NO: 10325 - protein, 111 aa, Homo sapiens; identical to SEQ ID NO: 10317

SEQ ID NO: 10326 - protein, 119 aa, Homo sapiens; identical to SEQ ID NO: 10308

SEQ ID NO: 10327 - protein, 111 aa, Homo sapiens
QSVLTQPPSVSGAPGQRVTISCTSSSSDIGAGLGVHWYQQLPGTAPKLLIEGYYNRPSGVPDRFSGSKSGTSASLTITGLLPEDEGDYYCQSFDGTLSALFGGGTKLTVLG

SEQ ID NO: 10328 - protein, 5 aa, Homo sapiens
SYFWS

SEQ ID NO: 10329 - protein, 16 aa, Homo sapiens
YIYYSGNTKYNPSLKS

SEQ ID NO: 10330 - protein, 10 aa, Homo sapiens
ETGSYYGFDY

SEQ ID NO: 10331 - protein, 11 aa, Homo sapiens
RASQSINNYLN

SEQ ID NO: 10332 - protein, 7 aa, Homo sapiens
AASSLQS

SEQ ID NO: 10333 - protein, 9 aa, Homo sapiens
QQSYSTPRT

SEQ ID NO: 10334 - protein, 118 aa, Homo sapiens
QVQLQESGPGLVKPSETLSLTCTVSGGSISSYFWSWIRQPPGKGLEWIGYIYYSGNTKYNPSLKSRVTISIDTSKNQFSLKLSSVTAADTAVYYCARETGSYYGFDYWGQGTLVTVSS

SEQ ID NO: 10335 - protein, 107 aa, Homo sapiens
DIQMTQSPSSLSASVGDRVTITCRASQSINNYLNWYQQRPGKAPKLLIYAASSLQSGVPSRFSGSGSGTDFTLTISSLQPGDFATYYCQQSYSTPRTFGQGTKLEIK

SEQ ID NO: 10336 - protein, 5 aa, Homo sapiens
GYYWN

SEQ ID NO: 10337 - protein, 16 aa, Homo sapiens
EINHAGNTNYNPSLKS

SEQ ID NO: 10338 - protein, 12 aa, Homo sapiens
GYCRSTTCYFDY

SEQ ID NO: 10339 - protein, 12 aa, Homo sapiens
RASQSVRSSYLA

SEQ ID NO: 10340 - protein, 7 aa, Homo sapiens
GASSRAT

SEQ ID NO: 10341 - protein, 8 aa, Homo sapiens
QQYGSSPT

SEQ ID NO: 10342 - protein, 120 aa, Homo sapiens
QVQLQQWGAGLLKPSETLSLTCAVHGGSFSGYYWNWIRQPPGKGLEWIGEINHAGNTNYNPSLKSRVTISLDTSKNQFSLTLTSVTAADTAVYYCARGYCRSTTCYFDYWGQGTLVTVSS

SEQ ID NO: 10343 - protein, 107 aa, Homo sapiens
EIVLTQSPGTLSLSPGERATLSCRASQSVRSSYLAWYQQKPGQAPRLLIYGASSRATGIPDRFSGSGSGTDFTLTISRLEPEDFAVYYCQQYGSSPTFGQGTRLEIK

SEQ ID NO: 10344 - protein, 116 aa, Homo sapiens
EVQLQQSGAELVKPGASVKLSCTASGFDIQDTYMHWVKQRPEQGLEWIGRIDPASGHTKYDPKFQVKATITTDTSSNTAYLQLSSLTSEDTAVYYCSRSGGLPDVWGAGTTVTVSS

SEQ ID NO: 10345 - protein, 106 aa, Homo sapiens
QIVLSQSPAILSASPGEKVTMTCRASSSVSYMYWYQQKPGSSPKPWIYATSNLASGVPDRFSGSGSGTSYSLTISRVEAEDAATYYCQQWSGNPRTFGGGTKLEIK

SEQ ID NO: 10346 - protein, 10 aa, Homo sapiens
GFDIQDTYMH

SEQ ID NO: 10347 - protein, 17 aa, Homo sapiens
RIDPASGHTKYDPKFQV

SEQ ID NO: 10348 - protein, 7 aa, Homo sapiens
SGGLPDV

SEQ ID NO: 10349 - protein, 10 aa, Homo sapiens
RASSSVSYMY

SEQ ID NO: 10350 - protein, 7 aa, Homo sapiens
ATSNLAS

SEQ ID NO: 10351 - protein, 9 aa, Homo sapiens
QQWSGNPRT

SEQ ID NO: 10352 - protein, 116 aa, Homo sapiens
QVQLVQSGAEVKKPGASVKLSCKASGFDIQDTYMHWVRQAPGQGLEWMGRIDPASGHTKYDPKFQVRVTMTTDTSTSTVYMELSSLRSEDTAVYYCSRSGGLPDVWGQGTTVTVSS

SEQ ID NO: 10353 - protein, 106 aa, Homo sapiens
EIVLTQSPGTLSLSPGERVTMSCRASSSVSYMYWYQQKPGQAPRPWIYATSNLASGVPDRFSGSGSGTDYTLTISRLEPEDFAVYYCQQWSGNPRTFGGGTKLEIK

SEQ ID NO: 10354 - protein, 116 aa, Homo sapiens
QVQLVQSGAEVKKPGASVKLSCKASGFDIQDTYMHWVRQAPGQGLEWMGRIDPASGHTKYDPKFQVRVTMTRDTSTSTVYMELSSLRSEDTAVYYCSRSGGLPDVWGQGTTVTVSS

SEQ ID NO: 10355 - protein, 106 aa, Homo sapiens
EIVLTQSPGTLSLSPGERATLSCRASSSVSYMYWYQQKPGQAPRLLIYATSNLASGIPDRFSGSGSGTDFTLTISRLEPEDFAVYYCQQWSGNPRTFGGGTKLEIK

SEQ ID NO: 10356 - protein, 116 aa, Homo sapiens
QVQLVQSGAEVKKPGASVKVSCKASGFDIQDTYMHWVRQAPGQGLEWMGRIDPASGHTKYDPKFQVRVTMTRDTSTSTVYMELSSLRSEDTAVYYCARSGGLPDVWGQGTTVTVSS

SEQ ID NO: 10357 - protein, 106 aa, Homo sapiens
EIVLTQSPGTLSLSPGERATLSCRASSSVSYMYWYQQKPGQAPRLLIYATSNLASGVPDRFSGSGSGTDYTLTISRLEPEDFAVYYCQQWSGNPRTFGGGTKLEIK

SEQ ID NO: 10358 - protein, 121 aa, Homo sapiens
EVMLVESGGGLVKPGGSLKLSCAASGFTFTNYAMSWVRQTPEKRLEWVATITSGGSYIYYLDSVKGRFTISRDNAKSTLYLQMSSLRSEDTAIYNCARRKDGNYYYAMDYWGQGTSVTVSS

SEQ ID NO: 10359 - protein, 121 aa, Homo sapiens
EVMLVESGGGLVKPGGSLKLSCAASGFTFTNYAMSWVRQTPEKRLEWVATITSGGSYIYYLDSVKGRFTISRDNAKSTLYLQMSSLRSEDTAIYYCARRKDGNYYYAMDYWGQGTSVTVSS

SEQ ID NO: 10360 - protein, 121 aa, Homo sapiens
EVQLVESGGGLVKPGGSLRLSCAASGFTFTNYAMSWVRQAPGQRLEWVSTITSGGSYIYYLDSVKGRFTISRDNAKSTLYLQMNSLRAEDTAVYNCARRKDGNYYYAMDYWGQGTTVTVSS

SEQ ID NO: 10361 - protein, 121 aa, Homo sapiens
EVQLVESGGGLVKPGGSLRLSCAASGFTFTNYAMSWVRQAPGQRLEWVSTITSGGSYIYYLDSVKGRFTISRDNAKSTLYLQMNSLRAEDTAVYYCARRKDGNYYYAMDYWGQGTTVTVSS

SEQ ID NO: 10362 - protein, 121 aa, Homo sapiens
EVQLLESGGGLVQPGRSLRLSCAASGFTFTNYAMSWVRQAPGQRLEWLATITSGGSYIYYLDSVKGRFTISRDNSKSTLYLQMGSLRAEDMAVYNCARRKDGNYYYAMDYWGQGTTVTVSS

SEQ ID NO: 10363 - protein, 121 aa, Homo sapiens
EVQLLESGGGLVQPGRSLRLSCAASGFTFTNYAMSWVRQAPGQRLEWLATITSGGSYIYYLDSVKGRFTISRDNSKSTLYLQMGSLRAEDMAVYYCARRKDGNYYYAMDYWGQGTTVTVSS

SEQ ID NO: 10364 - protein, 121 aa, Homo sapiens
QVQLVESGGGLIQPGGSLRLSCAASGFTFTNYAMSWVRQARGQRLEWVSTITSGGSYIYYLDSVKGRFTISRDNSKSTLYMELSSLRSEDTAVYNCARRKDGNYYYAMDYWGQGTTVTVSS

SEQ ID NO: 10365 - protein, 121 aa, Homo sapiens
QVQLVESGGGLIQPGGSLRLSCAASGFTFTNYAMSWVRQARGQRLEWVSTITSGGSYIYYLDSVKGRFTISRDNSKSTLYMELSSLRSEDTAVYYCARRKDGNYYYAMDYWGQGTTVTVSS

SEQ ID NO: 10366 - protein, 121 aa, Homo sapiens
QVQLVQSGSELKKPGASVKVSCKASGFTFTNYAMSWVRQAPGKRLEWVSTITSGGSYIYYLDSVKGRFTISRENAKSTLYLQMNSLRTEDTALYNCARRKDGNYYYAMDYWGQGTTVTVSS

SEQ ID NO: 10367 - protein, 121 aa, Homo sapiens
QVQLVQSGSELKKPGASVKVSCKASGFTFTNYAMSWVRQAPGKRLEWVATITSGGSYIYYLDSVKGRFTISRENAKSTLYLQMNSLRTEDTALYYCARRKDGNYYYAMDYWGQGTTVTVSS

SEQ ID NO: 10368 - protein, 121 aa, Homo sapiens
EVQLLQSGAEVKKPGASVKVSCKASGFTFTNYAMSWVRQAPGQRLEWVATITSGGSYIYYLDSVKGRFTISRDNAKSTLHLQMNSLRAEDTAVYNCARRKDGNYYYAMDYWGQGTTVTVSS

SEQ ID NO: 10369 - protein, 121 aa, Homo sapiens
EVQLLQSGAEVKKPGASVKVSCKASGFTFTNYAMSWVRQAPGQRLEWVATITSGGSYIYYLDSVKGRFTISRDNAKSTLHLQMNSLRAEDTAIYYCARRKDGNYYYAMDYWGQGTTVTVSS

SEQ ID NO: 10370 - protein, 121 aa, Homo sapiens
EVMLLQSGAEVKKPGASVKVSCKASGFTFTNYAMSWVRQAPGQRLEWVATITSGGSYIYYLDSVKGRFTISRDNAKSTLHLQMNSLRAEDTAVYYCARRKDGNYYYAMDYWGQGTTVTVSS

SEQ ID NO: 10371 - protein, 111 aa, Homo sapiens
DIVLTQSPASLAVSLGQRATISCRASESVDSYGNSFIHWYQQKAGQPPKLLIYRASNLESGIPARFSGSGSRTDFTLTINPVEADDVATYYCQQSYEDPWTFGGGTKLEIK

SEQ ID NO: 10372 - protein, 111 aa, Homo sapiens
  MOD_RES 108: note = Any amino acid
DIVLTQSPATLSLSPGERATLSCRASESVDSYGNSFIHWYQQKPGQPPKLLIYRASNLESGIPARFSGSGSRTDFTLTISSLEPEDFAVYYCQQSYEDPWTFGGGTKXEIK

SEQ ID NO: 10373 - protein, 111 aa, Homo sapiens
  MOD_RES 108: note = Any amino acid
DIVLTQSPSSLSASVGDRVTITCRASESVDSYGNSFIHWYQQKPGQPPKLLIYRASNLESGIPARFSGSGSRTDFTLTISSLQPEDFATYYCQQSYEDPWTFGGGTKXEIK

SEQ ID NO: 10374 - protein, 111 aa, Homo sapiens
  MOD_RES 108: note = Any amino acid
DIVLTQSPDFQSVTPKEKVTITCRASESVDSYGNSFIHWYQQKPGQPPKLLIYRASNLESGIPARFSGSGSRTDFTLTISSLEAEDAATYYCQQSYEDPWTFGGGTKXEIK

SEQ ID NO: 10375 - protein, 111 aa, Homo sapiens
  MOD_RES 108: note = Any amino acid
DIVLTQTPLSLSVTPGQPASISCRASESVDSYGNSFIHWYQQKPGQPPKLLIYRASNLESGIPARFSGSGSRTDFTLKISRVEAEDVGVYYCQQSYEDPWTFGGGTKXEIK

SEQ ID NO: 10376 - protein, 5 aa, Homo sapiens
TYGMS

SEQ ID NO: 10377 - protein, 17 aa, Homo sapiens
WMNTYSGVTTYADDFKG

SEQ ID NO: 10378 - protein, 13 aa, Homo sapiens
EGYVFDDYYATDY

SEQ ID NO: 10379 - protein, 16 aa, Homo sapiens
RSSQNIVHSDGNTYLE

SEQ ID NO: 10380 - protein, 7 aa, Homo sapiens
KVSNRFS

SEQ ID NO: 10381 - protein, 9 aa, Homo sapiens
FQGSHVPLT

SEQ ID NO: 10382 - protein, 122 aa, Homo sapiens
QIQLVQSGPELKKPGETVKISCKASGYTFTTYGMSWVKQAPGKGLKWMGWMNTYSGVTTYADDFKGRFAFSLETSASTAYMQIDNLKNEDTATYFCAREGYVFDDYYATDYWGQGTSVTVSS

SEQ ID NO: 10383 - protein, 112 aa, Homo sapiens
DVLMTQTPLSLPVSLGDQASISCRSSQNIVHSDGNTYLEWYLQKPGQSPKLLIYKVSNRFSGVPDRFSGSGSGTDFTLKISRVEAEDLGIYYCFQGSHVPLTFGAGTKLELK

SEQ ID NO: 10384 - protein, 5 aa, Homo sapiens
KYDIN

SEQ ID NO: 10385 - protein, 17 aa, Homo sapiens
WIFPGDGRTDYNEKFKG

SEQ ID NO: 10386 - protein, 7 aa, Homo sapiens
YGPAMDY

SEQ ID NO: 10387 - protein, 16 aa, Homo sapiens
RSSQTIVHSNGDTYLD

SEQ ID NO: 10388 - protein, 7 aa, Homo sapiens
KVSNRFS

SEQ ID NO: 10389 - protein, 9 aa, Homo sapiens
FQGSHVPYT

SEQ ID NO: 10390 - protein, 135 aa, Homo sapiens
MGWSWVFLFLLSVTAGVHSQVHLQQSGPELVKPGASVKLSCKASGYTFTKYDINWVRQRPEQGLEWIGWIFPGDGRTDYNEKFKGKATLTTDKSSSTAYMEVSRLTSEDSAVYFCARYGPAMDYWGQGTSVTVAS

SEQ ID NO: 10391 - protein, 131 aa, Homo sapiens
MKLPVRLLVLMFWIPASSSDVLMTQTPLSLPVSLGDQASISCRSSQTIVHSNGDTYLDWFLQKPGQSPKLLIYKVSNRFSGVPDRFSGSGSGTDFTLKISRVEAEDLGVYYCFQGSHVPYTFGGGTKLEIK

SEQ ID NO: 10392-11099 - skipped (708 entries)

SEQ ID NO: 11100 - protein, 5 aa, Homo sapiens
SYIWS

SEQ ID NO: 11101 - protein, 16 aa, Homo sapiens
RIYASGNTNYNPSLKS

SEQ ID NO: 11102 - protein, 16 aa, Homo sapiens
DYRVAGTYYYYYGLDV

SEQ ID NO: 11103 - protein, 14 aa, Homo sapiens
TGTSSDVGVYDYVS

SEQ ID NO: 11104 - protein, 7 aa, Homo sapiens
EVSNRPS

SEQ ID NO: 11105 - protein, 10 aa, Homo sapiens
SSYTSRSTWV

SEQ ID NO: 11106 - protein, 5 aa, Homo sapiens
SYYWT

SEQ ID NO: 11107 - protein, 16 aa, Homo sapiens
RIYTSGITNYNPSLKS

SEQ ID NO: 11108 - protein, 16 aa, Homo sapiens
ERVVGASRYYYYGVDV

SEQ ID NO: 11109 - protein, 14 aa, Homo sapiens
TGTSSDVGLYNYVS

SEQ ID NO: 11110 - protein, 7 aa, Homo sapiens
EVNNRPS

SEQ ID NO: 11111 - protein, 10 aa, Homo sapiens
SSYTSSSTWV

SEQ ID NO: 11112 - protein, 5 aa, Homo sapiens
SYYWT

SEQ ID NO: 11113 - protein, 16 aa, Homo sapiens
RIYTSGITNYNPSLKS

SEQ ID NO: 11114 - protein, 16 aa, Homo sapiens
ERVVGASRYYYYGVDV

SEQ ID NO: 11115 - protein, 14 aa, Homo sapiens
TGTSSDIGLYDYVS

SEQ ID NO: 11116 - protein, 7 aa, Homo sapiens
EVNNRPS

SEQ ID NO: 11117 - protein, 10 aa, Homo sapiens
SSYTSSSTWV

SEQ ID NO: 11118 - protein, 5 aa, Homo sapiens
SYSWS

SEQ ID NO: 11119 - protein, 16 aa, Homo sapiens
RTSTSGRNNYNPSLKS

SEQ ID NO: 11120 - protein, 16 aa, Homo sapiens
DFTIAARRYYYYGMDV

SEQ ID NO: 11121 - protein, 14 aa, Homo sapiens
TGTSSDIGLYNYVS

SEQ ID NO: 11122 - protein, 7 aa, Homo sapiens
EVINRPS

SEQ ID NO: 11123 - protein, 10 aa, Homo sapiens
SSYTSSSTWV

SEQ ID NO: 11124 - protein, 5 aa, Homo sapiens
NNYWS

SEQ ID NO: 11125 - protein, 16 aa, Homo sapiens
RVYSSGLTNYKPSLKS

SEQ ID NO: 11126 - protein, 16 aa, Homo sapiens
ERATVTTRYHYDGMDV

SEQ ID NO: 11127 - protein, 14 aa, Homo sapiens
TGSSSDIGTYNYVS

SEQ ID NO: 11128 - protein, 7 aa, Homo sapiens
EVNNRPS

SEQ ID NO: 11129 - protein, 10 aa, Homo sapiens
SSYSSSSTWV

SEQ ID NO: 11130 - protein, 5 aa, Homo sapiens
SYYWS

SEQ ID NO: 11131 - protein, 16 aa, Homo sapiens
RIFASGSTNYNPSLRS

SEQ ID NO: 11132 - protein, 16 aa, Homo sapiens
ERVGVQDYYHYSGMDV

SEQ ID NO: 11133 - protein, 14 aa, Homo sapiens
TGTSSDVGLYNYVS

SEQ ID NO: 11134 - protein, 7 aa, Homo sapiens
EVSKRPS

SEQ ID NO: 11135 - protein, 10 aa, Homo sapiens
SSYTSSSTWV

SEQ ID NO: 11136 - protein, 124 aa, Homo sapiens
QVQLQESGPGLVKPSETLSLTCTVSGGSISSYYWTWIRQPAGKGLEWIGRIYTSGITNYNPSLKSRVTMSVDTSKNQFSLKLSSVTAADTAVYYCARERVVGASRYYYYGVDVWGQGTTVTVSS

SEQ ID NO: 11137 - protein, 110 aa, Homo sapiens
QSALTQPASVSGSPGQSITISCTGTSSDVGLYNYVSWYQQHPDKAPKLMIFEVNNRPSGVSNRFSGSNSGNTASLTISGLQAEDEADYYCSSYTSSSTWVFGGGTKLTVL

SEQ ID NO: 11138 - protein, 124 aa, Homo sapiens; identical to SEQ ID NO: 11136

SEQ ID NO: 11139 - protein, 110 aa, Homo sapiens
QSALTQPASVSGSPGQSITISCTGTSSDIGLYDYVSWYQQHPDRAPKLIIFEVNNRPSGVSYRFSGSNSGNTASLTISGLQAEDEADYYCSSYTSSSTWVFGGGTKLTVL

SEQ ID NO: 11140 - protein, 124 aa, Homo sapiens
QVQLQESGPGLVKPSETLSLTCTVSGGSISSYSWSWIRQPAGKGLEWIGRTSTSGRNNYNPSLKSRVTMSVDTSKNQFSLKLNSVTAADTAVYYCARDFTIAARRYYYYGMDVWGQGTTVTVSS

SEQ ID NO: 11141 - protein, 110 aa, Homo sapiens
QSALTQPASVSGSPGQSITISCTGTSSDIGLYNYVSWYQQHPGKAPKLIIYEVINRPSGVSNRFSGSESGNTASLTISGLQAEDEANYYCSSYTSSSTWVFGGGTKLTVL

SEQ ID NO: 11142 - protein, 124 aa, Homo sapiens
QVQLQESGPRLVKPSETLSLTCTVSGGSITNNYWSWIRQPAGKGLEWIGRVYSSGLTNYKPSLKSRVTMSVDTSKNQFSLRLNSVTAADTAVYYCARERATVTTRYHYDGMDVWGQGTSVTVSS

SEQ ID NO: 11143 - protein, 110 aa, Homo sapiens
QSALTQPASVSGSPGQSITISCTGSSSDIGTYNYVSWYQQYPGKAPELMIYEVNNRPSGVSDRFSGSTSGNTASLTISGLQANDEADYYCSSYSSSSTWVFGGGTKLTVL

SEQ ID NO: 11144 - protein, 124 aa, Homo sapiens
QVQLQESGPGLVKPSETLSLTCTVSGGSISSYYWSWIRQPAGKGLEWIGRIFASGSTNYNPSLRSRVTMSRDTSKNQFSLKLSSVTAADTAVYYCAKERVGVQDYYHYSGMDVWGQGTTVTVSS

SEQ ID NO: 11145 - protein, 110 aa, Homo sapiens
QSALTQPASVSGSPGQSITISCTGTSSDVGLYNYVSWYQQQPGKAPKLMIYEVSKRPSGVSNRFSGSTSGNTASLTISGLQADDEADYSCSSYTSSSTWVFGGGTKLTVL

SEQ ID NO: 11146 - protein, 124 aa, Homo sapiens
QVQLQESGPGLVKPSETLSLTCTVSGGSISSYIWSWIRQPAGKGLEWIGRIYASGNTNYNPSLKSRVTISVDTSKNQFSLKLSSMTAADTAVYYCARDYRVAGTYYYYYGLDVWGQGTTVTVSS

SEQ ID NO: 11147 - protein, 124 aa, Homo sapiens
QVQLQESGPGLVKPSETLSLTCTVSGGSISSYIWSWIRQPAGKGLEWIGRIYASGNTNYNPSLKSRVTMSVDTSKNQFSLKLSSMTAADTAVYYCARDYRVAGTYYYYYGLDVWGQGTTVTVSS

SEQ ID NO: 11148 - protein, 124 aa, Homo sapiens
QVQLQESGPGLVKPSETLSLTCTVSGGSISSYIWSWIRQPAGKGLEWIGRIYASGNTNYNPSLKSRVTMSVDTSKNQFSLKLSSVTAADTAVYYCARDYRVAGTYYYYYGLDVWGQGTTVTVSS

SEQ ID NO: 11149 - protein, 124 aa, Homo sapiens
QVQLQESGPGLVKPSETLSLTCTVSGGSISSYIWSWIRQPAGKGLEWIGRIYASGQTNYNPSLKSRVTMSVDTSKNQFSLKLSSMTAADTAVYYCARDYRVAGTYYYYYGLDVWGQGTTVTVSS

SEQ ID NO: 11150 - protein, 124 aa, Homo sapiens
QVQLQESGPGLVKPSETLSLTCTVSGGSISSYIWSWIRQPAGKGLEWIGRIYASGQTNYNPSLKSRVTISVDTSKNQFSLKLSSVTAADTAVYYCARDYRVAGTYYYYYGLDVWGQGTTVTVSS

SEQ ID NO: 11151 - protein, 124 aa, Homo sapiens
QVQLQESGPGLVKPSETLSLTCTVSGGSISSYIWSWIRQPAGKGLEWIGRIYASGNTNYNPSLKSRVTISVDTSKNQFSLKLSSVTAADTAVYYCARDYRVAGTYYYYYGLDVWGQGTTVTVSS

SEQ ID NO: 11152 - protein, 124 aa, Homo sapiens
QVQLQESGPGLVKPSETLSLTCTVSGGSISSYIWSWIRQPAGKGLEWIGRIYASGQTNYNPSLKSRVTISVDTSKNQFSLKLSSMTAADTAVYYCARDYRVAGTYYYYYGLDVWGQGTTVTVSS

SEQ ID NO: 11153 - protein, 124 aa, Homo sapiens
QVQLQESGPGLVKPSETLSLTCTVSGGSISSYIWSWIRQPAGKGLEWIGRIYASGQTNYNPSLKSRVTMSVDTSKNQFSLKLSSVTAADTAVYYCARDYRVAGTYYYYYGLDVWGQGTTVTVSS

SEQ ID NO: 11154 - protein, 110 aa, Homo sapiens
QSALTQPASVSGSPGQSITISCTGTSSDVGVYDYVSWYQQHPGKAPKLMIYEVSNRPSGVSNRFSGSKSGNTASLTISGLQTEDEADYYCSSYTSRSTWVFGGGTKLTVL
